(19) United States
(12) Patent Application Publication
(10) Pub. No.: US 2005/0260177 A1
(43) Pub. Date: Nov. 24, 2005

(54) Compounds for immunotherapy and diagnosis of colon cancer and methods for their use

(75) Inventors: Jiangchun Xu, Bellevue, WA (US); Michael J. Lodes, Seattle, WA (US); Heather Secrist, Seattle, WA (US); Darin R. Benson, Seattle, WA (US); Madeleine Joy Meagher, Seattle, WA (US); John A. Stolk, Bothell, WA (US); Tongtong Wang, Medina, WA (US); Yuqiu Jiang, San Diego, CA (US); Carole L. Smith, Seattle, WA (US); Gordon E. King, Shoreline, WA (US); Aijun Wang, Issaquah, WA (US); Jonathan D. Clapper, Seattle, WA (US); Yasir A. W. Skeiky, Silver Spring, MD (US); Gary R. Fanger, Mill Creek, WA (US); Thomas S. Vedvick, Federal Way, WA (US); Darrick Carter, (US)

Correspondence Address: SEED INTELLECTUAL PROPERTY LAW GROUP PLLC, 701 FIFTH AVE, SUITE 6300, SEATTLE, WA, 98104-7092, US

(73) Assignee: Corixa Corporation, Seattle, WA (US)

(21) Appl. No.: 11/108,172

(22) Filed: Apr. 15, 2005

Related U.S. Application Data
(63) Continuation of application No. 10/025,380, filed on Dec. 19, 2001, now abandoned.
Application No. 10/025,380 is a continuation-in-part of application No. 09/922,217, filed on Aug. 3, 2001, now abandoned.
Application No. 09/922,217 is a continuation-in-part of application No. 09/833,263, filed on Apr. 10, 2001, now abandoned.
Application No. 09/833,263 is a continuation-in-part of application No. 09/649,811, filed on Aug. 28, 2000, now abandoned.
Application No. 09/649,811 is a continuation-in-part of application No. 09/609,448, filed on Jun. 29, 2000, now abandoned.
Application No. 09/609,448 is a continuation-in-part of application No. 09/575,251, filed on May 19, 2000, now abandoned.
Application No. 09/575,251 is a continuation-in-part of application No. 09/519,444, filed on Mar. 6, 2000, now abandoned.
Application No. 09/519,444 is a continuation-in-part of application No. 09/504,629, filed on Feb. 15, 2000, now abandoned.
Application No. 09/504,629 is a continuation-in-part of application No. 09/480,321, filed on Jan. 10, 2000, now abandoned.
Application No. 09/480,321 is a continuation-in-part of application No. 09/476,296, filed on Dec. 30, 1999, now abandoned.
Application No. 09/476,296 is a continuation-in-part of application No. 09/454,150, filed on Dec. 2, 1999, now abandoned.
Application No. 09/454,150 is a continuation-in-part of application No. 09/444,252, filed on Nov. 19, 1999, now abandoned.
Application No. 09/444,252 is a continuation-in-part of application No. 09/401,064, filed on Sep. 22, 1999, now Pat. No. 6,623,923.
Application No. 09/401,064 is a continuation-in-part of application No. 09/347,496, filed on Jul. 2, 1999, now abandoned.
Application No. 09/347,496 is a continuation-in-part of application No. 09/221,298, filed on Dec. 23, 1998, now Pat. No. 6,284,241.

(30) Foreign Application Priority Data
Dec. 23, 1999 (WO) PCT/US99/30909

(51) Int. Cl. C12Q 1/68; G01N 33/574; C12N 15/09; A61K 45/00; C07K 16/30; C07K 14/82

(52) U.S. Cl. 424/93.7; 435/6; 435/69.3; 435/320.1; 435/325; 530/350; 530/388.8; 435/7.23

(57) ABSTRACT

Compositions and methods for the therapy and diagnosis of cancer, such as colon cancer, are disclosed. Compositions may comprise one or more colon tumor proteins, immunogenic portions thereof, or polynucleotides that encode such portions. Alternatively, a therapeutic composition may comprise an antigen presenting cell that expresses a colon tumor protein, or a T cell that is specific for cells expressing such a protein. Such compositions may be used, for example, for the prevention and treatment of diseases such as colon cancer. Diagnostic methods based on detecting a colon tumor protein, or mRNA encoding such a protein, in a sample are also provided.

### STATEMENT REGARDING SEQUENCE LISTING SUBMITTED ON CD-ROM

[0001] The Sequence Listing associated with this application is provided on CD-ROM in lieu of a paper copy, and is hereby incorporated by reference into the specification. Three CD-ROMs are provided, containing identical copies of the sequence listing: CD-ROM No. 1 is labeled COPY 1, contains the file 471c15.app.txt which is 941 KB and created on Apr. 15, 2005; CD-ROM No. 2 is labeled COPY 2, contains the file 471c15.app.txt which is 941 KB and created on Apr. 15, 2005; CD-ROM No. 3 is labeled CRF (Computer Readable Form), contains the file 471c15.app.txt which is 941 KB and created on Apr. 15, 2005.

### BACKGROUND OF THE INVENTION

[0002] 1. Field of the Invention

[0003] The present invention relates generally to therapy and diagnosis of cancer, such as colon cancer. The invention is more specifically related to polypeptides comprising at least a portion of a colon tumor protein, and to polynucleotides encoding such polypeptides. Such polypeptides and polynucleotides may be used in vaccines and pharmaceutical compositions for prevention and treatment of colon cancer, and for the diagnosis and monitoring of such cancers.

[0004] 2. Description of the Related Art

[0005] Cancer is a significant health problem throughout the world. Although advances have been made in detection and therapy of cancer, no vaccine or other universally successful method for prevention or treatment is currently available. Current therapies, which are generally based on a combination of chemotherapy or surgery and radiation, continue to prove inadequate in many patients.

[0006] Colon cancer is the second most frequently diagnosed malignancy in the United States as well as the second most common cause of cancer death. The five-year survival rate for patients with colorectal cancer detected in an early localized stage is 92%; unfortunately, only 37% of colorectal cancer is diagnosed at this stage. The survival rate drops to 64% if the cancer is allowed to spread to adjacent organs or lymph nodes, and to 7% in patients with distant metastases.

[0007] The prognosis of colon cancer is directly related to the degree of penetration of the tumor through the bowel wall and the presence or absence of nodal involvement, consequently, early detection and treatment are especially important. Currently, diagnosis is aided by the use of screening assays for fecal occult blood, sigmoidoscopy, colonoscopy and double contrast barium enemas. Treatment regimens are determined by the type and stage of the cancer, and include surgery, radiation therapy and/or chemotherapy. Recurrence following surgery (the most common form of therapy) is a major problem and is often the ultimate cause of death. In spite of considerable research into therapies for the disease, colon cancer remains difficult to diagnose and treat. In spite of considerable research into therapies for these and other cancers, colon cancer remains difficult to diagnose and treat effectively. Accordingly, there is a need in the art for improved methods for detecting and treating such cancers. The present invention fulfills these needs and further provides other related advantages.

### BRIEF SUMMARY OF THE INVENTION

[0008] In one aspect, the present invention provides polynucleotide compositions comprising a sequence selected from the group consisting of:
[0009] (a) sequences provided in SEQ ID NOs:1-121, 123-197, 205-630, 632-684, 686, 690-691, 694-1058, 1069, 1071-1076, 1082, 1084, 1086, 1092, 1094, 1096-1101, 1103-1106, 1111-1114, 1119, 1120, and 1125,
[0010] (b) complements of the sequences provided in SEQ ID NOs:1-121, 123-197, 205-630, 632-684, 686, 690-691, 694-1058, 1069, 1071-1076, 1082, 1084, 1086, 1092, 1094, 1096-1101, 1103-1106, 1111-1114, 1119, 1120, and 1125;
[0011] (c) sequences consisting of at least 20 contiguous residues of a sequence provided in SEQ ID NOs:1-121, 123-197, 205-630, 632-684, 686, 690-691, 694-1058, 1069, 1071-1076, 1082, 1084, 1086, 1092, 1094, 1096-1101, 1103-1106, 1111-1114, 1119, 1120, and 1125;
[0012] (d) sequences that hybridize to a sequence provided in SEQ ID NOs: 1-121, 123-197, 205-630, 632-684, 686, 690-691, 694-1058, 1069, 1071-1076, 1082, 1084, 1086, 1092, 1094, 1096-1101, 1103-1106, 1111-1114, 1119, 1120, and 1125, under moderately stringent conditions;
[0013] (e) sequences having at least 75% identity to a sequence of SEQ ID NOs:1-121, 123-197, 205-630, 632-684, 686, 690-691, 694-1058, 1069, 1071-1076, 1082, 1084, 1086, 1092, 1094, 1096-1101, 1103-1106, 1111-1114, 1119, 1120, and 1125;
[0014] (f) sequences having at least 90% identity to a sequence of SEQ ID NOs:1-121, 123-197, 205-630, 632-684, 686, 690-691, 694-1058, 1069, 1071-1076, 1082, 1084, 1086, 1092, 1094, 1096-1101, 1103-1106, 1111-1114, 1119, 1120, and 1125, and
[0015] (g) degenerate variants of a sequence provided in SEQ ID NOs:1-121, 123-197, 205-630, 632-684, 686, 690-691, 694-1058, 1069, 1071-1076, 1082, 1084, 1086, 1092, 1094, 1096-1101, 1103-1106, 1111-1114, 1119, 1120, and 1125,

[0016] In one preferred embodiment, the polynucleotide compositions of the invention are expressed in at least about 20%, more preferably in at least about 30%, and most preferably in at least about 50% of colon tumors samples tested, at a level that is at least about 2-fold, preferably at least about 5-fold, and most preferably at least about 10-fold higher than that for normal tissues.

[0017] The present invention, in another aspect, provides polypeptide compositions comprising an amino acid sequence that is encoded by a polynucleotide sequence described above.

[0018] The present invention further provides polypeptide compositions comprising an amino acid sequence selected from the group consisting of sequences recited in SEQ ID NOs:122, 198-204, 631, 685, 687, 692, 693, 1059-1068, 1070, 1077-1081, 1083, 1085, 1087, 1093, 1095, 1102, 1107-1110, 1115-1118, 1121, 1122, and 1126-1129.

[0019] In certain preferred embodiments, the polypeptides and/or polynucleotides of the present invention are immunogenic, i.e., they are capable of eliciting an immune response, particularly a humoral and/or cellular immune response, as further described herein.

[0020] The present invention further provides fragments, variants and/or derivatives of the disclosed polypeptide and/or polynucleotide sequences, wherein the fragments, variants and/or derivatives preferably have a level of immunogenic activity of at least about 50%, preferably at least about 70% and more preferably at least about 90% of the level of immunogenic activity of a polypeptide sequence set forth in SEQ ID NOs:122, 198-204, 631, 685, 687, 692, 693, 1059-1068, 1070, 1077-1081, 1083, 1085, 1087, 1093, 1095, 1102, 1107-1110, 1115-1118, 1121, 1122, and 1126-1129 or a polypeptide sequence encoded by a polynucleotide sequence set forth in SEQ ID NOs:1-121, 123-197, 205-630, 632-684, 686, 690-691, 694-1058, 1069, 1071-1076, 1082, 1084, 1086, 1092, 1094, 1096-1101, 1103-1106, 1111-1114, 1119, 1120, and 1125.

[0021] The present invention further provides polynucleotides that encode a polypeptide described above, expression vectors comprising such polynucleotides and host cells transformed or transfected with such expression vectors.

[0022] Within other aspects, the present invention provides pharmaceutical compositions comprising a polypeptide or polynucleotide as described above and a physiologically acceptable carrier.

[0023] Within a related aspect of the present invention, the pharmaceutical compositions, e.g., vaccine compositions, are provided for prophylactic or therapeutic applications. Such compositions generally comprise an immunogenic polypeptide or polynucleotide of the invention and an immunostimulant, such as an adjuvant.

[0024] The present invention further provides pharmaceutical compositions that comprise: (a) an antibody or antigen-binding fragment thereof that specifically binds to a polypeptide of the present invention, or a fragment thereof; and (b) a physiologically acceptable carrier.

[0025] Within further aspects, the present invention provides pharmaceutical compositions comprising: (a) an antigen presenting cell that expresses a polypeptide as described above and (b) a pharmaceutically acceptable carrier or excipient. Illustrative antigen presenting cells include dendritic cells, macrophages, monocytes, fibroblasts and B cells.

[0026] Within related aspects, pharmaceutical compositions are provided that comprise: (a) an antigen presenting cell that expresses a polypeptide as described above and (b) an immunostimulant.

[0027] The present invention further provides, in other aspects, fusion proteins that comprise at least one polypeptide as described above, as well as polynucleotides encoding such fusion proteins, typically in the form of pharmaceutical compositions, e.g., vaccine compositions, comprising a physiologically acceptable carrier and/or an immunostimulant. The fusions proteins may comprise multiple imunogenic polypeptides or portions/variants thereof, as described herein, and may further comprise one or more polypeptide segments for facilitating the expression, purification and/or immunogenicity of the polypeptide(s).

[0028] Within further aspects, the present invention provides methods for stimulating an immune response in a patient, preferably a T cell response in a human patient, comprising administering a pharmaceutical composition described herein. The patient may be afflicted with colon cancer, in which case the methods provide treatment for the disease, or patient considered at risk for such a disease may be treated prophylactically.

[0029] Within further aspects, the present invention provides methods for inhibiting the development of a cancer in a patient, comprising administering to a patient a pharmaceutical composition as recited above. The patient may be afflicted with colon cancer, in which case the methods provide treatment for the disease, or patient considered at risk for such a disease may be treated prophylactically.

[0030] The present invention further provides, within other aspects, methods for removing tumor cells from a biological sample, comprising contacting a biological sample with T cells that specifically react with a polypeptide of the present invention, wherein the step of contacting is performed under conditions and for a time sufficient to permit the removal of cells expressing the protein from the sample.

[0031] Within related aspects, methods are provided for inhibiting the development of a cancer in a patient, comprising administering to a patient a biological sample treated as described above.

[0032] Methods are further provided, within other aspects, for stimulating and/or expanding T cells specific for a polypeptide of the present invention, comprising contacting T cells with one or more of: (i) a polypeptide as described above; (ii) a polynucleotide encoding such a polypeptide; and/or (iii) an antigen presenting cell that expresses such a polypeptide; under conditions and for a time sufficient to permit the stimulation and/or expansion of T cells. Isolated T cell populations comprising T cells prepared as described above are also provided.

[0033] Within further aspects, the present invention provides methods for inhibiting the development of a cancer in a patient, comprising administering to a patient an effective amount of a T cell population as described above.

[0034] The present invention further provides methods for inhibiting the development of a cancer in a patient, comprising the steps of: (a) incubating CD4⁺ and/or CD8⁺ T cells isolated from a patient with one or more of: (i) a polypeptide comprising at least an immunogenic portion of polypeptide disclosed herein; (ii) a polynucleotide encoding such a polypeptide; and (iii) an antigen-presenting cell that expressed such a polypeptide; and (b) administering to the patient an effective amount of the proliferated T cells, and thereby inhibiting the development of a cancer in the patient. Proliferated cells may, but need not, be cloned prior to administration to the patient.

[0035] Within further aspects, the present invention provides methods for determining the presence or absence of a cancer, preferably a colon cancer, in a patient comprising: (a) contacting a biological sample obtained from a patient with a binding agent that binds to a polypeptide as recited above; (b) detecting in the sample an amount of polypeptide that binds to the binding agent; and (c) comparing the amount of polypeptide with a predetermined cut-off value, and therefrom determining the presence or absence of a cancer in the patient. Within preferred embodiments, the binding agent is an antibody, more preferably a monoclonal antibody.

[0036] The present invention also provides, within other aspects, methods for monitoring the progression of a cancer in a patient. Such methods comprise the steps of: (a) contacting a biological sample obtained from a patient at a first point in time with a binding agent that binds to a polypeptide as recited above; (b) detecting in the sample an amount of polypeptide that binds to the binding agent; (c) repeating steps (a) and (b) using a biological sample obtained from the patient at a subsequent point in time; and (d) comparing the amount of polypeptide detected in step (c) with the amount detected in step (b) and therefrom monitoring the progression of the cancer in the patient.

[0037] The present invention further provides, within other aspects, methods for determining the presence or absence of a cancer in a patient, comprising the steps of: (a) contacting a biological sample obtained from a patient with an oligonucleotide that hybridizes to a polynucleotide that encodes a polypeptide of the present invention; (b) detecting in the sample a level of a polynucleotide, preferably mRNA, that hybridizes to the oligonucleotide; and (c) comparing the level of polynucleotide that hybridizes to the oligonucleotide with a predetermined cut-off value, and therefrom determining the presence or absence of a cancer in the patient. Within certain embodiments, the amount of mRNA is detected via polymerase chain reaction using, for example, at least one oligonucleotide primer that hybridizes to a polynucleotide encoding a polypeptide as recited above, or a complement of such a polynucleotide. Within other embodiments, the amount of mRNA is detected using a hybridization technique, employing an oligonucleotide probe that hybridizes to a polynucleotide that encodes a polypeptide as recited above, or a complement of such a polynucleotide.

[0038] In related aspects, methods are provided for monitoring the progression of a cancer in a patient, comprising the steps of: (a) contacting a biological sample obtained from a patient with an oligonucleotide that hybridizes to a polynucleotide that encodes a polypeptide of the present invention; (b) detecting in the sample an amount of a polynucleotide that hybridizes to the oligonucleotide; (c) repeating steps (a) and (b) using a biological sample obtained from the patient at a subsequent point in time; and (d) comparing the amount of polynucleotide detected in step (c) with the amount detected in step (b) and therefrom monitoring the progression of the cancer in the patient.

[0039] Within further aspects, the present invention provides antibodies, such as monoclonal antibodies, that bind to a polypeptide as described above, as well as diagnostic kits comprising such antibodies. Diagnostic kits comprising one or more oligonucleotide probes or primers as described above are also provided.

[0040] These and other aspects of the present invention will become apparent upon reference to the following detailed description. All references disclosed herein are hereby incorporated by reference in their entirety as if each was incorporated individually.

### BRIEF DESCRIPTION OF THE SEQUENCE IDENTIFIERS

[0041] SEQ ID NO: 1 is a first determined cDNA sequence for Contig 1, showing homology to Neutrophil Gelatinase Associated Lipocalin.

[0042] SEQ ID NO: 2 is the determined cDNA sequence for Contig 2, showing no significant homology to any known genes.

[0043] SEQ ID NO: 3 is the determined cDNA sequence for Contig 4, showing homology to Carcinoembryonic antigen.

[0044] SEQ ID NO: 4 is the determined cDNA sequence for Contig 5, showing homology to Carcinoembryonic antigen.

[0045] SEQ ID NO: 5 is the determined cDNA sequence for Contig 9, showing homology to Carcinoembryonic antigen.

[0046] SEQ ID NO: 6 is the determined cDNA sequence for Contig 52, showing homology to Carcinoembryonic antigen.

[0047] SEQ ID NO: 7 is the determined cDNA sequence for Contig 6, showing homology toVillin.

[0048] SEQ ID NO: 8 is the determined cDNA sequence for Contig 8, showing no significant homology to any known genes.

[0049] SEQ ID NO: 9 is the determined cDNA sequence for Contig 10, showing homology to Transforming Growth Factor (BIGH3).

[0050] SEQ ID NO: 10 is the determined cDNA sequence for Contig 19, showing homology to Transforming Growth Factor (BIGH3).

[0051] SEQ ID NO: 11 is the determined cDNA sequence for Contig 21, showing homology to Transforming Growth Factor (BIGH3).

[0052] SEQ ID NO: 12 is the determined cDNA sequence for Contig 11, showing homology to CO-029.

[0053] SEQ ID NO: 13 is the determined cDNA sequence for Contig 55, showing homology to CO-029.

[0054] SEQ ID NO: 14 is the determined cDNA sequence for Contig 12, showing homology to Chromosome 17, clone hRPC.1171_I_{—}10, also referred to as C798P.

[0055] SEQ ID NO: 15 is the determined cDNA sequence for Contig 13, showing no significant homology to any known gene.

[0056] SEQ ID NO: 16 is the determined cDNA sequence for Contig 14, also referred to as 14261, showing no significant homology to any known gene.

[0057] SEQ ID NO: 17 is the determined cDNA sequence for Contig 15, showing homology to Ets-Related Transcription Factor (ERT).

[0058] SEQ ID NO: 18 is the determined cDNA sequence for Contig 16, showing homology to Chromosome 5, PAC clone 228g9 (LBNL H142).

[0059] SEQ ID NO: 19 is the determined cDNA sequence for Contig 24, showing homology to Chromosome 5, PAC clone 228g9 (LBNL H142).

[0060] SEQ ID NO: 20 is the determined cDNA sequence for Contig 17, showing homology to Cytokeratin.

[0061] SEQ ID NO: 21 is the determined cDNA sequence for Contig 18, showing homology to L1-Cadherin.

[0062] SEQ ID NO: 22 is the determined cDNA sequence for Contig 0.20, showing no significant homology to any known gene.

[0063] SEQ ID NO: 23 is the determined cDNA sequence for Contig 22, showing homology to Bumetanide-sensitive Na—K—Cl cotransporter (NKCCl).

[0064] SEQ ID NO: 24 is the determined cDNA sequence for Contig 23, showing no significant homology to any known gene.

[0065] SEQ ID NO: 25 is the determined cDNA sequence for Contig 25, showing homology to Macrophage Inflammatory Protein 3 alpha.

[0066] SEQ ID NO: 26 is the determined cDNA sequence for Contig 26, showing homology to Laminin.

[0067] SEQ ID NO: 27 is the determined cDNA sequence for Contig 48, showing homology to Laminin.

[0068] SEQ ID NO: 28 is the determined cDNA sequence for Contig 27, showing homology to Mytobularin (MTM1).

[0069] SEQ ID NO: 29 is the determined cDNA sequence for Contig 28, showing homology to Chromosome 16 BAC clone CIT987SK-A-363E6.

[0070] SEQ ID NO: 30 is the determined cDNA sequence for Contig 29, also referred to as C751P and 14247, showing no significant homology to any known gene, but partial homology to Rat GSK-3β-interacting protein Axil homolog.

[0071] SEQ ID NO: 31 is the determined cDNA sequence for Contig 30, showing homology to Zinc Finger Transcription Factor (ZNF207).

[0072] SEQ ID NO: 32 is the determined cDNA sequence for Contig 31, showing no significant homology to any known gene, but partial homology to Mus musculus GOB-4 homolog.

[0073] SEQ ID NO: 33 is the determined cDNA sequence for Contig 35, showing no significant homology to any known gene, but partial homology to Mus musculus GOB-4 homolog.

[0074] SEQ ID NO: 34 is the determined cDNA sequence for Contig 32, showing no significant homology to any known gene.

[0075] SEQ ID NO: 35 is the determined cDNA sequence for Contig 34, showing homology to Desmoglein 2.

[0076] SEQ ID NO: 36 is the determined cDNA sequence for Contig 36, showing no significant homology to any known gene.

[0077] SEQ ID NO: 37 is the determined cDNA sequence for Contig 37, showing homology to Putative Transmembrane Protein.

[0078] SEQ ID NO: 38 is the determined cDNA sequence for Contig 38, also referred to as C796P and 14219, showing no significant homology to any known gene.

[0079] SEQ ID NO: 39 is the determined cDNA sequence for Contig 40, showing homology to Nonspecific Cross-reacting Antigen.

[0080] SEQ ID NO: 40 is the determined cDNA sequence for Contig 41, also referred to as C799P and 14308, showing no significant homology to any known gene.

[0081] SEQ ID NO: 41 is the determined cDNA sequence for Contig 42, also referred to as C794P and 14309, showing no significant homology to any known gene.

[0082] SEQ ID NO: 42 is the determined cDNA sequence for Contig 43, showing homology to Chromosome 1 specific transcript KIAA0487.

[0083] SEQ ID NO: 43 is the determined cDNA sequence for Contig 45, showing homology to hMCM2.

[0084] SEQ ID NO: 44 is the determined cDNA sequence for Contig 46, showing homology to ETS2.

[0085] SEQ ID NO: 45 is the determined cDNA sequence for Contig 49, showing homology to Pump-1.

[0086] SEQ ID NO: 46 is the determined cDNA sequence for Contig 50, also referred to as C792P and 18323, showing no significant homology to any known gene.

[0087] SEQ ID NO: 47 is the determined cDNA sequence for Contig 51, also referred to as C795P and 14317, showing no significant homology to any known gene.

[0088] SEQ ID NO: 48 is the determined cDNA sequence for 11092, showing no significant homology to any known gene.

[0089] SEQ ID NO: 49 is the determined cDNA sequence for 11093, showing no significant homology to any known gene.

[0090] SEQ ID NO: 50 is the determined cDNA sequence for 11094, showing homology Human Putative Enterocyte Differentiation Protein.

[0091] SEQ ID NO: 51 is the determined cDNA sequence for 11095, showing homology to Human Transcriptional Corepressor hKAP1/TIF1B mRNA.

[0092] SEQ ID NO: 52 is the determined cDNA sequence for 11096, showing no significant homology to any known gene.

[0093] SEQ ID NO: 53 is the determined cDNA sequence for 11097, showing homology to Human Nonspecific Antigen.

[0094] SEQ ID NO: 54 is the determined cDNA sequence for 11098, showing no significant homology to any known gene.

[0095] SEQ ID NO: 55 is the determined cDNA sequence for 11099, showing homology to Human Pancreatic Secretory Inhibitor (PST) mRNA.

[0096] SEQ ID NO: 56 is the determined cDNA sequence for 11186, showing homology to Human Pancreatic Secretory Inhibitor (PST) mRNA.

[0097] SEQ ID NO: 57 is the determined cDNA sequence for 11101, showing homology to Human Chromosome X.

[0098] SEQ ID NO: 58 is the determined cDNA sequence for 11102, showing homology to Human Chromosome X.

[0099] SEQ ID NO: 59 is the determined cDNA sequence for 11103, showing no significant homology to any known gene.

[0100] SEQ ID. NO: 60 is the determined cDNA sequence for 11174, showing no significant homology to any known gene.

[0101] SEQ ID NO: 61 is the determined cDNA sequence for 11104, showing homology to Human mRNA for KIAA0154.

[0102] SEQ ID NO: 62 is the determined cDNA sequence for 11105, showing homology to Human Apurinic/Apyrimidinic Endonuclease (hap1) mRNA.

[0103] SEQ ID NO: 63 is the determined cDNA sequence for 11106, showing homology to Human Chromosome 12p 13.

[0104] SEQ ID NO: 64 is the determined cDNA sequence for 11107, showing homology to Human 90 kDa Heat Shock Protein.

[0105] SEQ ID NO: 65 is the determined cDNA sequence for 11108, showing no significant homology to any known gene.

[0106] SEQ ID NO: 66 is the determined cDNA sequence for 11112, showing no significant homology to any known gene.

[0107] SEQ ID NO: 67 is the determined cDNA sequence for 11115, showing no significant homology to any known gene.

[0108] SEQ ID NO: 68 is the determined cDNA sequence for 11117, showing no significant homology to any known gene.

[0109] SEQ ID NO: 69 is the determined cDNA sequence for 11118, showing no significant homology to any known gene.

[0110] SEQ ID NO: 70 is the determined cDNA sequence for 11119, showing homology to Human Elongation Factor 1-alpha.

[0111] SEQ ID NO: 71 is the determined cDNA sequence for 11121, showing homology to Human Lamin B Receptor (LBR) mRNA.

[0112] SEQ ID NO: 72 is the determined cDNA sequence for 11122, showing homology to H. sapiens mRNA for Novel Glucocorticoid.

[0113] SEQ ID NO: 73 is the determined cDNA sequence for 11123, showing homology to H. sapiens mRNA for snRNP protein B.

[0114] SEQ ID NO: 74 is the determined cDNA sequence for 11124, showing homology to Human Cisplatin Resistance Associated Beta-protein.

[0115] SEQ ID NO: 75 is the determined cDNA sequence for 11127, showing homology to M. musculus Calumenin mRNA.

[0116] SEQ ID NO: 76 is the determined cDNA sequence for 11128, showing homology to Human ras-related small GTP binding protein.

[0117] SEQ ID NO: 77 is the determined cDNA sequence for 11130, showing homology to Human Cosmid U169d2.

[0118] SEQ ID NO: 78 is the determined cDNA sequence for 11131, showing homology to H. sapiens mRNA for protein homologous to Elongation 1-g.

[0119] SEQ ID NO: 79 is the determined cDNA sequence for 11134, showing no significant homology to any known gene.

[0120] SEQ ID NO: 80 is the determined cDNA sequence for 11135, showing homology to H. sapiens Nieman-Pick (NPC1) mRNA.

[0121] SEQ ID NO: 81 is the determined cDNA sequence for 11137, showing homology to H. sapiens mRNA for Niecin b-chain.

[0122] SEQ ID NO: 82 is the determined cDNA sequence for 11138, showing homology to Human Endogenous Retroviral Protease mRNA.

[0123] SEQ ID NO: 83 is the determined cDNA sequence for 11139, showing homology to H. sapiens mRNA for DMBT1 protein.

[0124] SEQ ID NO: 84 is the determined cDNA sequence for 11140, showing homology to H. sapiens ras GTPase activating-like protein.

[0125] SEQ ID NO: 85 is the determined cDNA sequence for 11143, showing homology to Human Acidic Ribosomal Phosphoprotein PO mRNA.

[0126] SEQ ID NO: 86 is the determined cDNA sequence for 11144, showing homology to H. sapiens U21 mRNA.

[0127] SEQ ID NO: 87 is the determined cDNA sequence for 11145, showing homology to Human GTP-binding protein.

[0128] SEQ ID NO: 88 is the determined cDNA sequence for 11148, showing homology to H. sapiens U21 mRNA.

[0129] SEQ ID NO: 89 is the determined cDNA sequence for 11151, showing no significant homology to any known gene.

[0130] SEQ ID NO: 90 is the determined cDNA sequence for 11154, showing no significant homology to any known gene.

[0131] SEQ ID NO: 91 is the determined cDNA sequence for 11156, showing homology to H. sapiens Ribosomal Protein L27.

[0132] SEQ ID NO: 92 is the determined cDNA sequence for 11157, showing homology to H. sapiens Ribosomal Protein L27.

[0133] SEQ ID NO: 93 is the determined cDNA sequence for 11158, showing no significant homology to any known gene.

[0134] SEQ ID NO: 94 is the determined cDNA sequence for 11162, showing homology to Ag-X antigen.

[0135] SEQ ID NO: 95 is the determined cDNA sequence for 11164, showing homology to H. sapiens mRNA for Signal Recognition Protein sub14.

[0136] SEQ ID NO: 96 is the determined cDNA sequence for 11165, showing homology to Human PAC 204e5/127h14.

[0137] SEQ ID NO: 97 is the determined cDNA sequence for 11166, showing homology to Human mRNA for KIAA0108.

[0138] SEQ ID NO: 98 is the determined cDNA sequence for 11167, showing homology to H. sapiens mRNA for Neutrophil Gelatinase assct. Lipocalin.

[0139] SEQ ID NO: 99 is the determined cDNA sequence for 11168, showing no significant homology to any known gene.

[0140] SEQ ID NO: 100 is the determined cDNA sequence for 11172, showing no significant homology to any known gene.

[0141] SEQ ID NO: 101 is the determined cDNA sequence for 11175, showing no significant homology to any known gene.

[0142] SEQ ID NO: 102 is the determined cDNA sequence for 11176, showing homology to Human maspin mRNA.

[0143] SEQ ID NO: 103 is the determined cDNA sequence for 11177, showing homology to Human Carcinoembryonic Antigen.

[0144] SEQ ID NO: 104 is the determined cDNA sequence for 11178, showing homology to Human A-Tubulin mRNA.

[0145] SEQ ID NO: 105 is the determined cDNA sequence for 11179, showing homology to Human mRNA for proton-ATPase-like protein.

[0146] SEQ ID NO: 106 is the determined cDNA sequence for 11180, showing homology to Human HepG2 3′ region cDNA clone hmd.

[0147] SEQ ID NO: 107 is the determined cDNA sequence for 11182, showing homology to Human MHC homologous to Chicken B-Complex Protein.

[0148] SEQ ID NO: 108 is the determined cDNA sequence for 11183, showing homology to Human High Mobility Group Box (SSRP1) mRNA.

[0149] SEQ ID NO: 109 is the determined cDNA sequence for 11184, showing no significant homology to any known gene.

[0150] SEQ ID NO: 110 is the determined cDNA sequence for 11185, showing no significant homology to any known gene.

[0151] SEQ ID NO: 111 is the determined cDNA sequence for 11187, showing no significant homology to any known gene.

[0152] SEQ ID NO: 112 is the determined cDNA sequence for 11190, showing homology to Human Replication Protein A 70 kDa.

[0153] SEQ ID NO: 113 is the determined cDNA sequence for Contig 47, also referred to as C797P, showing homology to Human Chromosome X clone bWXD342.

[0154] SEQ ID NO: 114 is the determined cDNA sequence for Contig 7, showing homology to Equilibrative Nucleoside Transporter 2 (ent2).

[0155] SEQ ID NO: 115 is the determined cDNA sequence for 14235.1, also referred to as C791P, showing homology to H. sapiens chromosome 21 derived BAC containing ets-2 gene.

[0156] SEQ ID NO: 116 is the determined cDNA sequence for 14287.2, showing no significant homology to any known gene, but some degree of homology to Putative Transmembrane Protein.

[0157] SEQ ID NO: 117 is the determined cDNA sequence for 14233.1, also referred to as Contig 48, showing no significant homology to any known gene.

[0158] SEQ ID NO: 118 is the determined cDNA sequence for 14298.2, also referred to as C793P, showing no significant homology to any known gene.

[0159] SEQ ID NO: 119 is the determined cDNA sequence for 14372, also referred to as Contig 44, showing no significant homology to any known gene.

[0160] SEQ ID NO: 120 is the determined cDNA sequence for 14295, showing homology to secreted cement gland protein XAG-2 homolog.

[0161] SEQ ID NO: 121 is the determined full-length cDNA sequence for a clone showing homology to Beta IG-H3.

[0162] SEQ ID NO: 122 is the predicted amino acid sequence for the clone of SEQ ID NO: 121.

[0163] SEQ ID NO: 123 is a longer determined cDNA sequence for C751P.

[0164] SEQ ID NO: 124 is a longer determined cDNA sequence for C791P.

[0165] SEQ ID NO: 125 is a longer determined cDNA sequence for C792P.

[0166] SEQ ID NO: 126 is a longer determined cDNA sequence for C793P.

[0167] SEQ ID NO: 127 is a longer determined cDNA sequence for C794P.

[0168] SEQ ID NO: 128 is a longer determined cDNA sequence for C795P.

[0169] SEQ ID NO: 129 is a longer determined cDNA sequence for C796P.

[0170] SEQ ID NO: 130 is a longer determined cDNA sequence for C797P.

[0171] SEQ ID NO: 131 is a longer determined cDNA sequence for C798P.

[0172] SEQ ID NO: 132 is a longer determined cDNA sequence for C799P.

[0173] SEQ ID NO: 133 is a first partial determined cDNA sequence for CoSub-3 (also known as 23569).

[0174] SEQ ID NO: 134 is a second partial determined cDNA sequence for CoSub-3 (also known as 23569).

[0175] SEQ ID NO: 135 is a first partial determined cDNA sequence for CoSub-13 (also known as 23579).

[0176] SEQ ID NO: 136 is a second partial determined cDNA sequence for CoSub-13 (also known as 23579).

[0177] SEQ ID NO: 137 is the determined cDNA sequence for CoSub-17 (also known as 23583).

[0178] SEQ ID NO: 138 is the determined cDNA sequence for CoSub-19 (also known as 23585).

[0179] SEQ ID NO: 139 is the determined cDNA sequence for CoSub-22 (also known as 23714).

[0180] SEQ ID NO: 140 is the determined cDNA sequence for CoSub-23 (also known as 23715).

[0181] SEQ ID NO: 141 is the determined cDNA sequence for CoSub-26 (also known as 23717).

[0182] SEQ ID NO: 142 is the determined cDNA sequence for CoSub-33 (also known as 23724).

[0183] SEQ ID NO: 143 is the determined cDNA sequence for CoSub-34 (also known as 23725).

[0184] SEQ ID NO: 144 is the determined cDNA sequence for CoSub-35 (also known as 23726).

[0185] SEQ ID NO: 145 is the determined cDNA sequence for CoSub-37 (also known as 23728).

[0186] SEQ ID NO: 146 is the determined cDNA sequence for CoSub-39 (also known as 23730).

[0187] SEQ ID NO: 147 is the determined cDNA sequence for CoSub-42 (also known as 23766).

[0188] SEQ ID NO: 148 is the determined cDNA sequence for CoSub-44 (also known as 23768).

[0189] SEQ ID NO: 149 is the determined cDNA sequence for CoSub-47 (also known as 23771).

[0190] SEQ ID NO: 150 is the determined cDNA sequence for CoSub-54 (also known as 23778).

[0191] SEQ ID NO: 151 is the determined cDNA sequence for CoSub-55 (also known as 23779).

[0192] SEQ ID NO: 152 is the determined cDNA sequence for CT1 (also known as 24099).

[0193] SEQ ID NO: 153 is the determined cDNA sequence for CT2 (also known as 24100).

[0194] SEQ ID NO: 154 is the determined cDNA sequence for CT3 (also known as 24101).

[0195] SEQ ID NO: 155 is the determined cDNA sequence for CT6 (also known as 24104).

[0196] SEQ ID NO: 156 is the determined cDNA sequence for CT7 (also known as 24105).

[0197] SEQ ID NO: 157 is the determined cDNA sequence for CT12 (also known as 24110).

[0198] SEQ ID NO: 158 is the determined cDNA sequence for CT13 (also known as 24111).

[0199] SEQ ID NO: 159 is the determined cDNA sequence for CT14 (also known as 24112).

[0200] SEQ ID NO: 160 is the determined cDNA sequence for CT15 (also known as 24113).

[0201] SEQ ID NO: 161 is the determined cDNA sequence for CT17 (also known as 24115).

[0202] SEQ ID NO: 162 is the determined cDNA sequence for CT18 (also known as 24116).

[0203] SEQ ID NO: 163 is the determined cDNA sequence for CT22 (also known as 23848).

[0204] SEQ ID NO: 164 is the determined cDNA sequence for CT24 (also known as 23849).

[0205] SEQ ID NO: 165 is the determined cDNA sequence for CT31 (also known as 23854).

[0206] SEQ ID NO: 166 is the determined cDNA sequence for CT34 (also known as 23856).

[0207] SEQ ID NO: 167 is the determined cDNA sequence for CT37 (also known as 23859).

[0208] SEQ ID NO: 168 is the determined cDNA sequence for CT39 (also known as 23860).

[0209] SEQ ID NO: 169 is the determined cDNA sequence for CT40 (also known as 23861).

[0210] SEQ ID NO: 170 is the determined cDNA sequence for CT51 (also known as 24130).

[0211] SEQ ID NO: 171 is the determined cDNA sequence for CT53 (also known as 24132).

[0212] SEQ ID NO: 172 is the determined cDNA sequence for CT63 (also known as 24595).

[0213] SEQ ID NO: 173 is the determined cDNA sequence for CT88 (also known as 24608).

[0214] SEQ ID NO: 174 is the determined cDNA sequence for CT92 (also known as 24800).

[0215] SEQ ID NO: 175 is the determined cDNA sequence for CT94 (also known as 24802).

[0216] SEQ ID NO: 176 is the determined cDNA sequence for CT102 (also known as 24805).

[0217] SEQ ID NO: 177 is the determined cDNA sequence for CT103 (also known as 24806).

[0218] SEQ ID NO: 178 is the determined cDNA sequence for CT111 (also known as 25520).

[0219] SEQ ID NO: 179 is the determined cDNA sequence for CT118 (also known as 25522).

[0220] SEQ ID NO: 180 is the determined cDNA sequence for CT121 (also known as 25523).

[0221] SEQ ID NO: 181 is the determined cDNA sequence for CT126 (also known as 25527).

[0222] SEQ ID NO: 182 is the determined cDNA sequence for CT135 (also known as 25534).

[0223] SEQ ID NO: 183 is the determined cDNA sequence for CT140 (also known as 25537).

[0224] SEQ ID NO: 184 is the determined cDNA sequence for CT145 (also known as 25542).

[0225] SEQ ID NO: 185 is the determined cDNA sequence for CT147 (also known as 25543).

[0226] SEQ ID NO: 186 is the determined cDNA sequence for CT148 (also known as 25544).

[0227] SEQ ID NO: 187 is the determined cDNA sequence for CT502 (also known as 26420).

[0228] SEQ ID NO: 188 is the determined cDNA sequence for CT507 (also known as 26425).

[0229] SEQ ID NO: 189 is the determined cDNA sequence for CT521 (also known as 27366).

[0230] SEQ ID NO: 190 is the determined cDNA sequence for CT544 (also known as 27375).

[0231] SEQ ID NO: 191 is the determined cDNA sequence for CT577 (also known as 27385).

[0232] SEQ ID NO: 192 is the determined cDNA sequence for CT580 (also known as 27387).

[0233] SEQ ID NO: 193 is the determined cDNA sequence for CT594 (also known as 27540).

[0234] SEQ ID NO: 194 is the determined cDNA sequence for CT606 (also known as 27547).

[0235] SEQ ID NO: 195 is the determined cDNA sequence for CT607 (also known as 27548).

[0236] SEQ ID NO: 196 is the determined cDNA sequence for CT599 (also known as 27903).

[0237] SEQ ID NO: 197 is the determined cDNA sequence for CT632 (also known as 27922).

[0238] SEQ ID NO: 198 is the predicted amino acid sequence for CT502 (SEQ ID NO: 187).

[0239] SEQ ID NO: 199 is the predicted amino acid sequence for CT507 (SEQ ID NO: 188).

[0240] SEQ ID NO: 200 is the predicted amino acid sequence for CT521 (SEQ ID NO: 189).

[0241] SEQ ID NO: 201 is the predicted amino acid sequence for CT544 (SEQ ID NO: 190).

[0242] SEQ ID NO: 202 is the predicted amino acid sequence for CT606 (SEQ ID NO: 194).

[0243] SEQ ID NO: 203 is the predicted amino acid sequence for CT607 (SEQ ID NO: 195).

[0244] SEQ ID NO: 204 is the predicted amino acid sequence for CT632 (SEQ ID NO: 197).

[0245] SEQ ID NO: 205 is the determined cDNA sequence for clone 25244.

[0246] SEQ ID NO: 206 is the determined cDNA sequence for clone 25245.

[0247] SEQ ID NO: 207 is the determined cDNA sequence for clone 25246.

[0248] SEQ ID NO: 208 is the determined cDNA sequence for clone 25248.

[0249] SEQ ID NO: 209 is the determined cDNA sequence for clone 25249.

[0250] SEQ ID NO: 210 is the determined cDNA sequence for clone 25250.

[0251] SEQ ID NO: 211 is the determined cDNA sequence for clone 25251.

[0252] SEQ ID NO: 212 is the determined cDNA sequence for clone 25252.

[0253] SEQ ID NO: 213 is the determined cDNA sequence for clone 25253.

[0254] SEQ ID NO: 214 is the determined cDNA sequence for clone 25254.

[0255] SEQ ID NO: 215 is the determined cDNA sequence for clone 25255.

[0256] SEQ ID NO: 216 is the determined cDNA sequence for clone 25256.

[0257] SEQ ID NO: 217 is the determined cDNA sequence for clone 25257.

[0258] SEQ ID NO: 218 is the determined cDNA sequence for clone 25259.

[0259] SEQ ID NO: 219 is the determined cDNA sequence for clone 25260.

[0260] SEQ ID NO: 220 is the determined cDNA sequence for clone 25261.

[0261] SEQ ID NO: 221 is the determined cDNA sequence for clone 25262.

[0262] SEQ ID NO: 222 is the determined cDNA sequence for clone 25263.

[0263] SEQ ID NO: 223 is the determined cDNA sequence for clone 25264.

[0264] SEQ ID NO: 224 is the determined cDNA sequence for clone 25265.

[0265] SEQ ID NO: 225 is the determined cDNA sequence for clone 25266.

[0266] SEQ ID NO: 226 is the determined cDNA sequence for clone 25267.

[0267] SEQ ID NO: 227 is the determined cDNA sequence for clone 25268.

[0268] SEQ ID NO: 228 is the determined cDNA sequence for clone 25269.

[0269] SEQ ID NO: 229 is the determined cDNA sequence for clone 25271.

[0270] SEQ ID NO: 230 is the determined cDNA sequence for clone 25272.

[0271] SEQ ID NO: 231 is the determined cDNA sequence for clone 25273.

[0272] SEQ ID NO: 232 is the determined cDNA sequence for clone 25274.

[0273] SEQ ID NO: 233 is the determined cDNA sequence for clone 25275.

[0274] SEQ ID NO: 234 is the determined cDNA sequence for clone 25276.

[0275] SEQ ID NO: 235 is the determined cDNA sequence for clone 25277.

[0276] SEQ ID NO: 236 is the determined cDNA sequence for clone 25278.

[0277] SEQ ID NO: 237 is the determined cDNA sequence for clone 25280.

[0278] SEQ ID NO: 238 is the determined cDNA sequence for clone 25281.

[0279] SEQ ID NO: 239 is the determined cDNA sequence for clone 25282.

[0280] SEQ ID NO: 240 is the determined cDNA sequence for clone 25283.

[0281] SEQ ID NO: 241 is the determined cDNA sequence for clone 25284.

[0282] SEQ ID NO: 242 is the determined cDNA sequence for clone 25285.

[0283] SEQ ID NO: 243 is the determined cDNA sequence for clone 25286.

[0284] SEQ ID NO: 244 is the determined cDNA sequence for clone 25287.

[0285] SEQ ID NO: 245 is the determined cDNA sequence for clone 25288.

[0286] SEQ ID NO: 246 is the determined cDNA sequence for clone 25289.

[0287] SEQ ID NO: 247 is the determined cDNA sequence for clone 25290.

[0288] SEQ ID NO: 248 is the determined cDNA sequence for clone 25291.

[0289] SEQ ID NO: 249 is the determined cDNA sequence for clone 25292.

[0290] SEQ ID NO: 250 is the determined cDNA sequence for clone 25293.

[0291] SEQ ID NO: 251 is the determined cDNA sequence for clone 25294.

[0292] SEQ ID NO: 252 is the determined cDNA sequence for clone 25295.

[0293] SEQ ID NO: 253 is the determined cDNA sequence for clone 25296.

[0294] SEQ ID NO: 254 is the determined cDNA sequence for clone 25297.

[0295] SEQ ID NO: 255 is the determined cDNA sequence for clone 25418.

[0296] SEQ ID NO: 256 is the determined cDNA sequence for clone 25419.

[0297] SEQ ID NO: 257 is the determined cDNA sequence for clone 25420.

[0298] SEQ ID NO: 258 is the determined cDNA sequence for clone 25421.

[0299] SEQ ID NO: 259 is the determined cDNA sequence for clone 25422.

[0300] SEQ ID NO: 260 is the determined cDNA sequence for clone 25423.

[0301] SEQ ID NO: 261 is the determined cDNA sequence for clone 25424.

[0302] SEQ ID NO: 262 is the determined cDNA sequence for clone 25426.

[0303] SEQ ID NO: 263 is the determined cDNA sequence for clone 25427.

[0304] SEQ ID NO: 264 is the determined cDNA sequence for clone 25428.

[0305] SEQ ID NO: 265 is the determined cDNA sequence for clone 25429.

[0306] SEQ ID NO: 266 is the determined cDNA sequence for clone 25430.

[0307] SEQ ID NO: 267 is the determined cDNA sequence for clone 25431.

[0308] SEQ ID NO: 268 is the determined cDNA sequence for clone 25432.

[0309] SEQ ID NO: 269 is the determined cDNA sequence for clone 25433.

[0310] SEQ ID NO: 270 is the determined cDNA sequence for clone 25434.

[0311] SEQ ID NO: 271 is the determined cDNA sequence for clone 25435.

[0312] SEQ ID NO: 272 is the determined cDNA sequence for clone 25436.

[0313] SEQ ID NO: 273 is the determined cDNA sequence for clone 25437.

[0314] SEQ ID NO: 274 is the determined cDNA sequence for clone 25438.

[0315] SEQ ID NO: 275 is the determined cDNA sequence for clone 25439.

[0316] SEQ ID NO: 276 is the determined cDNA sequence for clone 25440.

[0317] SEQ ID NO: 277 is the determined cDNA sequence for clone 25441.

[0318] SEQ ID NO: 278 is the determined cDNA sequence for clone 25442.

[0319] SEQ ID NO: 279 is the determined cDNA sequence for clone 25443.

[0320] SEQ ID NO: 280 is the determined cDNA sequence for clone 25444.

[0321] SEQ ID NO: 281 is the determined cDNA sequence for clone 25445.

[0322] SEQ ID NO: 282 is the determined cDNA sequence for clone 25446.

[0323] SEQ ID NO: 283 is the determined cDNA sequence for clone 25447.

[0324] SEQ ID NO: 284 is the determined cDNA sequence for clone 25448.

[0325] SEQ ID NO: 285 is the determined cDNA sequence for clone 25844.

[0326] SEQ ID NO: 286 is the determined cDNA sequence for clone 25845.

[0327] SEQ ID NO: 287 is the determined cDNA sequence for clone 25846.

[0328] SEQ ID NO: 288 is the determined cDNA sequence for clone 25847.

[0329] SEQ ID NO: 289 is the determined cDNA sequence for clone 25848.

[0330] SEQ ID NO: 290 is the determined cDNA sequence for clone 25850.

[0331] SEQ ID NO: 291 is the determined cDNA sequence for clone 25851.

[0332] SEQ ID NO: 292 is the determined cDNA sequence for clone 25852.

[0333] SEQ ID NO: 293 is the determined cDNA sequence for clone 25853.

[0334] SEQ ID NO: 294 is the determined cDNA sequence for clone 25854.

[0335] SEQ ID NO: 295 is the determined cDNA sequence for clone 25855.

[0336] SEQ ID NO: 296 is the determined cDNA sequence for clone 25856.

[0337] SEQ ID NO: 297 is the determined cDNA sequence for clone 25857.

[0338] SEQ ID NO: 298 is the determined cDNA sequence for clone 25858.

[0339] SEQ ID NO: 299 is the determined cDNA sequence for clone 25859.

[0340] SEQ ID NO: 300 is the determined cDNA sequence for clone 25860.

[0341] SEQ ID NO: 301 is the determined cDNA sequence for clone 25861.

[0342] SEQ ID NO: 302 is the determined cDNA sequence for clone 25862.

[0343] SEQ ID NO: 303 is the determined cDNA sequence for clone 25863.

[0344] SEQ ID NO: 304 is the determined cDNA sequence for clone 25864.

[0345] SEQ ID NO: 305 is the determined cDNA sequence for clone 25865.

[0346] SEQ ID NO: 306 is the determined cDNA sequence for clone 25866.

[0347] SEQ ID NO: 307 is the determined cDNA sequence for clone 25867.

[0348] SEQ ID NO: 308 is the determined cDNA sequence for clone 25868.

[0349] SEQ ID NO: 309 is the determined cDNA sequence for clone 25869.

[0350] SEQ ID NO: 310 is the determined cDNA sequence for clone 25870.

[0351] SEQ ID NO: 311 is the determined cDNA sequence for clone 25871.

[0352] SEQ ID NO: 312 is the determined cDNA sequence for clone 25872.

[0353] SEQ ID NO: 313 is the determined cDNA sequence for clone 25873.

[0354] SEQ ID NO: 314 is the determined cDNA sequence for clone 25875.

[0355] SEQ ID NO: 315 is the determined cDNA sequence for clone 25876.

[0356] SEQ ID NO: 316 is the determined cDNA sequence for clone 25877.

[0357] SEQ ID NO: 317 is the determined cDNA sequence for clone 25878.

[0358] SEQ ID NO: 318 is the determined cDNA sequence for clone 25879.

[0359] SEQ ID NO: 319 is the determined cDNA sequence for clone 25880.

[0360] SEQ ID NO: 320 is the determined cDNA sequence for clone 25881.

[0361] SEQ ID NO: 321 is the determined cDNA sequence for clone 25882.

[0362] SEQ ID NO: 322 is the determined cDNA sequence for clone 25883.

[0363] SEQ ID NO: 323 is the determined cDNA sequence for clone 25884.

[0364] SEQ ID NO: 324 is the determined cDNA sequence for clone 25885.

[0365] SEQ ID NO: 325 is the determined cDNA sequence for clone 25886.

[0366] SEQ ID NO: 326 is the determined cDNA sequence for clone 25887.

[0367] SEQ ID NO: 327 is the determined cDNA sequence for clone 25888.

[0368] SEQ ID NO: 328 is the determined cDNA sequence for clone 25889.

[0369] SEQ ID NO: 329 is the determined cDNA sequence for clone 25890.

[0370] SEQ ID NO: 330 is the determined cDNA sequence for clone 25892.

[0371] SEQ ID NO: 331 is the determined cDNA sequence for clone 25894.

[0372] SEQ ID NO: 332 is the determined cDNA sequence for clone 25895.

[0373] SEQ ID NO: 333 is the determined cDNA sequence for clone 25896.

[0374] SEQ ID NO: 334 is the determined cDNA sequence for clone 25897.

[0375] SEQ ID NO: 335 is the determined cDNA sequence for clone 25899.

[0376] SEQ ID NO: 336 is the determined cDNA sequence for clone 25900.

[0377] SEQ ID NO: 337 is the determined cDNA sequence for clone 25901.

[0378] SEQ ID NO: 338 is the determined cDNA sequence for clone 25902.

[0379] SEQ ID NO: 339 is the determined cDNA sequence for clone 25903.

[0380] SEQ ID NO: 340 is the determined cDNA sequence for clone 25904.

[0381] SEQ ID NO: 341 is the determined cDNA sequence for clone 25906.

[0382] SEQ ID NO: 342 is the determined cDNA sequence for clone 25907.

[0383] SEQ ID NO: 343 is the determined cDNA sequence for clone 25908.

[0384] SEQ ID NO: 344 is the determined cDNA sequence for clone 25909.

[0385] SEQ ID NO: 345 is the determined cDNA sequence for clone 25910.

[0386] SEQ ID NO: 346 is the determined cDNA sequence for clone 25911.

[0387] SEQ ID NO: 347 is the determined cDNA sequence for clone 25912.

[0388] SEQ ID NO: 348 is the determined cDNA sequence for clone 25913.

[0389] SEQ ID NO: 349 is the determined cDNA sequence for clone 25914.

[0390] SEQ ID NO: 350 is the determined cDNA sequence for clone 25915.

[0391] SEQ ID NO: 351 is the determined cDNA sequence for clone 25916.

[0392] SEQ ID NO: 352 is the determined cDNA sequence for clone 25917.

[0393] SEQ ID NO: 353 is the determined cDNA sequence for clone 25918.

[0394] SEQ ID NO: 354 is the determined cDNA sequence for clone 25919.

[0395] SEQ ID NO: 355 is the determined cDNA sequence for clone 25920.

[0396] SEQ ID NO: 356 is the determined cDNA sequence for clone 25921.

[0397] SEQ ID NO: 357 is the determined cDNA sequence for clone 25922.

[0398] SEQ ID NO: 358 is the determined cDNA sequence for clone 25924.

[0399] SEQ ID NO: 359 is the determined cDNA sequence for clone 25925.

[0400] SEQ ID NO: 360 is the determined cDNA sequence for clone 25926.

[0401] SEQ ID NO: 361 is the determined cDNA sequence for clone 25927.

[0402] SEQ ID NO: 362 is the determined cDNA sequence for clone 25928.

[0403] SEQ ID NO: 363 is the determined cDNA sequence for clone 25929.

[0404] SEQ ID NO: 364 is the determined cDNA sequence for clone 25930.

[0405] SEQ ID NO: 365 is the determined cDNA sequence for clone 25931.

[0406] SEQ ID NO: 366 is the determined cDNA sequence for clone 25932.

[0407] SEQ ID NO: 367 is the determined cDNA sequence for clone 25933.

[0408] SEQ ID NO: 368 is the determined cDNA sequence for clone 25934.

[0409] SEQ ID NO: 369 is the determined cDNA sequence for clone 25935.

[0410] SEQ ID NO: 370 is the determined cDNA sequence for clone 25936.

[0411] SEQ ID NO: 371 is the determined cDNA sequence for clone 25939.

[0412] SEQ ID NO: 372 is the determined cDNA sequence for clone 32016.

[0413] SEQ ID NO: 373 is the determined cDNA sequence for clone 32021.

[0414] SEQ ID NO: 374 is the determined cDNA sequence for clone 31993.

[0415] SEQ ID NO: 375 is the determined cDNA sequence for clone 31997.

[0416] SEQ ID NO: 376 is the determined cDNA sequence for clone 31942.

[0417] SEQ ID NO: 377 is the determined cDNA sequence for clone 31937.

[0418] SEQ ID NO: 378 is the determined cDNA sequence for clone 31952.

[0419] SEQ ID NO: 379 is the determined cDNA sequence for clone 31992.

[0420] SEQ ID NO: 380 is the determined cDNA sequence for clone 31961.

[0421] SEQ ID NO: 381 is the determined cDNA sequence for clone 31964.

[0422] SEQ ID NO: 382 is the determined cDNA sequence for clone 32005.

[0423] SEQ ID NO: 383 is the determined cDNA sequence for clone 31980.

[0424] SEQ ID NO: 384 is the determined cDNA sequence for clone 31940.

[0425] SEQ ID NO: 385 is the determined cDNA sequence for clone 32004.

[0426] SEQ ID NO: 386 is the determined cDNA sequence for clone 31956.

[0427] SEQ ID NO: 387 is the determined cDNA sequence for clone 31934.

[0428] SEQ ID NO: 388 is the determined cDNA sequence for clone 31998.

[0429] SEQ ID NO: 389 is the determined cDNA sequence for clone 31973.

[0430] SEQ ID NO: 390 is the determined cDNA sequence for clone 31976.

[0431] SEQ ID NO: 391 is the determined cDNA sequence for clone 31988.

[0432] SEQ ID NO: 392 is the determined cDNA sequence for clone 31948.

[0433] SEQ ID NO: 393 is the determined cDNA sequence for clone 32013.

[0434] SEQ ID NO: 394 is the determined cDNA sequence for clone 31986.

[0435] SEQ ID NO: 395 is the determined cDNA sequence for clone 31954.

[0436] SEQ ID NO: 396 is the determined cDNA sequence for clone 31987.

[0437] SEQ ID NO: 397 is the determined cDNA sequence for clone 32029.

[0438] SEQ ID NO: 398 is the determined cDNA sequence for clone 32028.

[0439] SEQ ID NO: 399 is the determined cDNA sequence for clone 32012.

[0440] SEQ ID NO: 400 is the determined cDNA sequence for clone 31959.

[0441] SEQ ID NO: 401 is the determined cDNA sequence for clone 32027.

[0442] SEQ ID NO: 402 is the determined cDNA sequence for clone 31957.

[0443] SEQ ID NO: 403 is the determined cDNA sequence for clone 31950.

[0444] SEQ ID NO: 404 is the determined cDNA sequence for clone 32011.

[0445] SEQ ID NO: 405 is the determined cDNA sequence for clone 32022.

[0446] SEQ ID NO: 406 is the determined cDNA sequence for clone 32014.

[0447] SEQ ID NO: 407 is the determined cDNA sequence for clone 31963.

[0448] SEQ ID NO: 408 is the determined cDNA sequence for clone 31989.

[0449] SEQ ID NO: 409 is the determined cDNA sequence for clone 32015.

[0450] SEQ ID NO: 410 is the determined cDNA sequence for clone 32002.

[0451] SEQ ID NO: 411 is the determined cDNA sequence for clone 31939.

[0452] SEQ ID NO: 412 is the determined cDNA sequence for clone 32003.

[0453] SEQ ID NO: 413 is the determined cDNA sequence for clone 31936.

[0454] SEQ ID NO: 414 is the determined cDNA sequence for clone 32007.

[0455] SEQ ID NO: 415 is the determined cDNA sequence for clone 31965.

[0456] SEQ ID NO: 416 is the determined cDNA sequence for clone 31935.

[0457] SEQ ID NO: 417 is the determined cDNA sequence for clone 32008.

[0458] SEQ ID NO: 418 is the determined cDNA sequence for clone 31966.

[0459] SEQ ID NO: 419 is the determined cDNA sequence for clone 32020.

[0460] SEQ ID NO: 420 is the determined cDNA sequence for clone 31971.

[0461] SEQ ID NO: 421 is the determined cDNA sequence for clone 31977.

[0462] SEQ ID NO: 422 is the determined cDNA sequence for clone 31985.

[0463] SEQ ID NO: 423 is the determined cDNA sequence for clone 32023.

[0464] SEQ ID NO: 424 is the determined cDNA sequence for clone 31981.

[0465] SEQ ID NO: 425 is the determined cDNA sequence for clone 32006.

[0466] SEQ ID NO: 426 is the determined cDNA sequence for clone 31991.

[0467] SEQ ID NO: 427 is the determined cDNA sequence for clone 31995.

[0468] SEQ ID NO: 428 is the determined cDNA sequence for clone 32000.

[0469] SEQ ID NO: 429 is the determined cDNA sequence for clone 31990.

[0470] SEQ ID NO: 430 is the determined cDNA sequence for clone 31946.

[0471] SEQ ID NO: 431 is the determined cDNA sequence for clone 31938.

[0472] SEQ ID NO: 432 is the determined cDNA sequence for clone 31941.

[0473] SEQ ID NO: 433 is the determined cDNA sequence for clone 31982.

[0474] SEQ ID NO: 434 is the determined cDNA sequence for clone 31996.

[0475] SEQ ID NO: 435 is the determined cDNA sequence for clone 32010.

[0476] SEQ ID NO: 436 is the determined cDNA sequence for clone 31974.

[0477] SEQ ID NO: 437 is the determined cDNA sequence for clone 31983.

[0478] SEQ ID NO: 438 is the determined cDNA sequence for clone 31999.

[0479] SEQ ID NO: 439 is the determined cDNA sequence for clone 31949.

[0480] SEQ ID NO: 440 is the determined cDNA sequence for clone 31947.

[0481] SEQ ID NO: 441 is the determined cDNA sequence for clone 31994.

[0482] SEQ ID NO: 442 is the determined cDNA sequence for clone 31958.

[0483] SEQ ID NO: 443 is the determined cDNA sequence for clone 31975.

[0484] SEQ ID NO: 444 is the determined cDNA sequence for clone 31984.

[0485] SEQ ID NO: 445 is the determined cDNA sequence for clone 32024.

[0486] SEQ ID NO: 446 is the determined cDNA sequence for clone 31972.

[0487] SEQ ID NO: 447 is the determined cDNA sequence for clone 31943.

[0488] SEQ ID NO: 448 is the determined cDNA sequence for clone 32018.

[0489] SEQ ID NO: 449 is the determined cDNA sequence for clone 32026.

[0490] SEQ ID NO: 450 is the determined cDNA sequence for clone 32009.

[0491] SEQ ID NO: 451 is the determined cDNA sequence for clone 32019.

[0492] SEQ ID NO: 452 is the determined cDNA sequence for clone 32025.

[0493] SEQ ID NO: 453 is the determined cDNA sequence for clone 31967.

[0494] SEQ ID NO: 454 is the determined cDNA sequence for clone 31968.

[0495] SEQ ID NO: 455 is the determined cDNA sequence for clone 31955.

[0496] SEQ ID NO: 456 is the determined cDNA sequence for clone 31951.

[0497] SEQ ID NO: 457 is the determined cDNA sequence for clone 31970.

[0498] SEQ ID NO: 458 is the determined cDNA sequence for clone 31962.

[0499] SEQ ID NO: 459 is the determined cDNA sequence for clone 32001.

[0500] SEQ ID NO: 460 is the determined cDNA sequence for clone 31953.

[0501] SEQ ID NO: 461 is the determined cDNA sequence for clone 31944.

[0502] SEQ ID NO: 462 is the determined cDNA sequence for clone 31825.

[0503] SEQ ID NO: 463 is the determined cDNA sequence for clone 31828.

[0504] SEQ ID NO: 464 is the determined cDNA sequence for clone 31830.

[0505] SEQ ID NO: 465 is the determined cDNA sequence for clone 31841.

[0506] SEQ ID NO: 466 is the determined cDNA sequence for clone 31847.

[0507] SEQ ID NO: 467 is the determined cDNA sequence for clone 31850.

[0508] SEQ ID NO: 468 is the determined cDNA sequence for clone 31852.

[0509] SEQ ID NO: 469 is the determined cDNA sequence for clone 31855.

[0510] SEQ ID NO: 470 is the determined cDNA sequence for clone 31858.

[0511] SEQ ID NO: 471 is the determined cDNA sequence for clone 31861.

[0512] SEQ ID NO: 472 is the determined cDNA sequence for clone 31868.

[0513] SEQ ID NO: 473 is the determined cDNA sequence for clone 31870.

[0514] SEQ ID NO: 474 is the determined cDNA sequence for clone 31872.

[0515] SEQ ID NO: 475 is the determined cDNA sequence for clone 31873.

[0516] SEQ ID NO: 476 is the determined cDNA sequence for clone 31877.

[0517] SEQ ID NO: 477 is the determined cDNA sequence for clone 31878.

[0518] SEQ ID NO: 478 is the determined cDNA sequence for clone 31885.

[0519] SEQ ID NO: 479 is the determined cDNA sequence for clone 31888.

[0520] SEQ ID NO: 480 is the determined cDNA sequence for clone 31890.

[0521] SEQ ID NO: 481 is the determined cDNA sequence for clone 31893.

[0522] SEQ ID NO: 482 is the determined cDNA sequence for clone 31898.

[0523] SEQ ID NO: 483 is the determined cDNA sequence for clone 31901.

[0524] SEQ ID NO: 484 is the determined cDNA sequence for clone 31909.

[0525] SEQ ID NO: 485 is the determined cDNA sequence for clone 31910.

[0526] SEQ ID NO: 486 is the determined cDNA sequence for clone 31914.

[0527] SEQ ID NO: 487 is the determined cDNA sequence for contig 1.

[0528] SEQ ID NO: 488 is the determined cDNA sequence for contig 2.

[0529] SEQ ID NO: 489 is the determined cDNA sequence for contig 3.

[0530] SEQ ID NO: 490 is the determined cDNA sequence for contig 4.

[0531] SEQ ID NO: 491 is the determined cDNA sequence for contig 5.

[0532] SEQ ID NO: 492 is the determined cDNA sequence for contig 6.

[0533] SEQ ID NO: 493 is the determined cDNA sequence for contig 7.

[0534] SEQ ID NO: 494 is the determined cDNA sequence for contig 8.

[0535] SEQ ID NO: 495 is the determined cDNA sequence for contig 9.

[0536] SEQ ID NO: 496 is the determined cDNA sequence for contig 10.

[0537] SEQ ID NO: 497 is the determined cDNA sequence for contig 11

[0538] SEQ ID NO: 498 is the determined cDNA sequence for contig 12

[0539] SEQ ID NO: 499 is the determined cDNA sequence for contig 13.

[0540] SEQ ID NO: 500 is the determined cDNA sequence for contig 14.

[0541] SEQ ID NO: 501 is the determined cDNA sequence for contig 15.

[0542] SEQ ID NO: 502 is the determined cDNA sequence for contig 16.

[0543] SEQ ID NO: 503 is the determined cDNA sequence for contig 17.

[0544] SEQ ID NO: 504 is the determined cDNA sequence for contig 18.

[0545] SEQ ID NO: 505 is the determined cDNA sequence for contig 19.

[0546] SEQ ID NO: 506 is the determined cDNA sequence for contig 20.

[0547] SEQ ID NO: 507 is the determined cDNA sequence for contig 21.

[0548] SEQ ID NO: 508 is the determined cDNA sequence for contig 22.

[0549] SEQ ID NO: 509 is the determined cDNA sequence for contig 23.

[0550] SEQ ID NO: 510 is the determined cDNA sequence for contig 24.

[0551] SEQ ID NO: 511 is the determined cDNA sequence for contig 25.

[0552] SEQ ID NO: 512 is the determined cDNA sequence for contig 26.

[0553] SEQ ID NO: 513 is the determined cDNA sequence for contig 27.

[0554] SEQ ID NO: 514 is the determined cDNA sequence for contig 28.

[0555] SEQ ID NO: 515 is the determined cDNA sequence for contig 29.

[0556] SEQ ID NO: 516 is the determined cDNA sequence for contig 30.

[0557] SEQ ID NO: 517 is the determined cDNA sequence for contig 31.

[0558] SEQ ID NO: 518 is the determined cDNA sequence for contig 32.

[0559] SEQ ID NO: 519 is the determined cDNA sequence for contig 33.

[0560] SEQ ID NO: 520 is the determined cDNA sequence for contig 34.

[0561] SEQ ID NO: 521 is the determined cDNA sequence for contig 35.

[0562] SEQ ID NO: 522 is the determined cDNA sequence for contig 36.

[0563] SEQ ID NO: 523 is the determined cDNA sequence for contig 37.

[0564] SEQ ID NO: 524 is the determined cDNA sequence for contig 38.

[0565] SEQ ID NO: 525 is the determined cDNA sequence for contig 39.

[0566] SEQ ID NO: 526 is the determined cDNA sequence for contig 40.

[0567] SEQ ID NO: 527 is the determined cDNA sequence for contig 41.

[0568] SEQ ID NO: 528 is the determined cDNA sequence for contig 42.

[0569] SEQ ID NO: 529 is the determined cDNA sequence for contig 43.

[0570] SEQ ID NO: 530 is the determined cDNA sequence for contig 44.

[0571] SEQ ID NO: 531 is the determined cDNA sequence for contig 45.

[0572] SEQ ID NO: 532 is the determined cDNA sequence for contig 46.

[0573] SEQ ID NO: 533 is the determined cDNA sequence for contig 47.

[0574] SEQ ID NO: 534 is the determined cDNA sequence for contig 48.

[0575] SEQ ID NO: 535 is the determined cDNA sequence for contig 49.

[0576] SEQ ID NO: 536 is the determined cDNA sequence for contig 50.

[0577] SEQ ID NO: 537 is the determined cDNA sequence for contig 51.

[0578] SEQ ID NO: 538 is the determined cDNA sequence for contig 52.

[0579] SEQ ID NO: 539 is the determined cDNA sequence for contig 53.

[0580] SEQ ID NO: 540 is the determined cDNA sequence for contig 54.

[0581] SEQ ID NO: 541 is the determined cDNA sequence for contig 55.

[0582] SEQ ID NO: 542 is the determined cDNA sequence for contig 56.

[0583] SEQ ID NO: 543 is the determined cDNA sequence for contig 58.

[0584] SEQ ID NO: 544 is the determined cDNA sequence for contig 59.

[0585] SEQ ID NO: 545 is the determined cDNA sequence for contig 60.

[0586] SEQ ID NO: 546 is the determined cDNA sequence for contig 61.

[0587] SEQ ID NO: 547 is the determined cDNA sequence for contig 62.

[0588] SEQ ID NO: 548 is the determined cDNA sequence for contig 63.

[0589] SEQ ID NO: 549 is the determined cDNA sequence for contig 64.

[0590] SEQ ID NO: 550 is the determined cDNA sequence for contig 65.

[0591] SEQ ID NO: 551 is the determined cDNA sequence for contig 66.

[0592] SEQ ID NO: 552 is the determined cDNA sequence for contig 67.

[0593] SEQ ID NO: 553 is the determined cDNA sequence for contig 68.

[0594] SEQ ID NO: 554 is the determined cDNA sequence for contig 69.

[0595] SEQ ID NO: 555 is the determined cDNA sequence for contig 70.

[0596] SEQ ID NO: 556 is the determined cDNA sequence for contig 71.

[0597] SEQ ID NO: 557 is the determined cDNA sequence for contig 72.

[0598] SEQ ID NO: 558 is the determined cDNA sequence for contig 73.

[0599] SEQ ID NO: 559 is the determined cDNA sequence for contig 74.

[0600] SEQ ID NO: 560 is the determined cDNA sequence for contig 75.

[0601] SEQ ID NO: 561 is the determined cDNA sequence for contig 76.

[0602] SEQ ID NO: 562 is the determined cDNA sequence for contig 77.

[0603] SEQ ID NO: 563 is the determined cDNA sequence for contig 78.

[0604] SEQ ID NO: 564 is the determined cDNA sequence for contig 79.

[0605] SEQ ID NO: 565 is the determined cDNA sequence for contig 80.

[0606] SEQ ID NO: 566 is the determined cDNA sequence for contig 81.

[0607] SEQ ID NO: 567 is the determined cDNA sequence for contig 82.

[0608] SEQ ID NO: 568 is the determined cDNA sequence for contig 83.

[0609] SEQ ID NO: 569 is the determined cDNA sequence for clone CS1-101.

[0610] SEQ ID NO: 570 is the determined cDNA sequence for clone CS1-102.

[0611] SEQ ID NO: 571 is the determined cDNA sequence for clone CS1-104.

[0612] SEQ ID NO: 572 is the determined cDNA sequence for clone CS1-105.

[0613] SEQ ID NO: 573 is the determined 3′ cDNA sequence for clone CS1-106.

[0614] SEQ ID NO: 574 is the determined 5′ cDNA sequence for clone CS1-106.

[0615] SEQ ID NO: 575 is the determined cDNA sequence for clone CS1-114.

[0616] SEQ ID NO: 576 is the determined cDNA sequence for clone CS1-118.

[0617] SEQ ID NO: 577 is the determined cDNA sequence for clone CS1-120.

[0618] SEQ ID NO: 578 is the determined cDNA sequence for clone CS1-123.

[0619] SEQ ID NO: 579 is the determined 3′ cDNA sequence for clone CS1-124.

[0620] SEQ ID NO: 580 is the determined 5′ cDNA sequence for clone CS1-124.

[0621] SEQ ID NO: 581 is the determined cDNA sequence for clone CS1-128.

[0622] SEQ ID NO: 582 is the determined cDNA sequence for clone CS1-132.

[0623] SEQ ID NO: 583 is the determined cDNA sequence for clone CS1-136.

[0624] SEQ ID NO: 584 is the determined cDNA sequence for clone CS1-137.

[0625] SEQ ID NO: 585 is the determined cDNA sequence for clone CS1-139.

[0626] SEQ ID NO: 586 is the determined cDNA sequence for clone CS1-141.

[0627] SEQ ID NO: 587 is the determined cDNA sequence for clone CS1-152.

[0628] SEQ ID NO: 588 is the determined cDNA sequence for clone CS1-154.

[0629] SEQ ID NO: 589 is the determined cDNA sequence for clone CS1-156.

[0630] SEQ ID NO: 590 is the determined cDNA sequence for clone CS1-158.

[0631] SEQ ID NO: 591 is the determined cDNA sequence for clone CS1-160.

[0632] SEQ ID NO: 592 is the determined cDNA sequence for clone CS1-168.

[0633] SEQ ID NO: 593 is the determined cDNA sequence for clone CS1-169.

[0634] SEQ ID NO: 594 is the determined cDNA sequence for clone CS1-171.

[0635] SEQ ID NO: 595 is the determined cDNA sequence for clone CS1-176.

[0636] SEQ ID NO: 596 is the determined cDNA sequence for clone CS1-178.

[0637] SEQ ID NO: 597 is the determined cDNA sequence for clone CS1-180.

[0638] SEQ ID NO: 598 is the determined cDNA sequence for clone CS1-183.

[0639] SEQ ID NO: 599 is the determined cDNA sequence for clone CS1-184.

[0640] SEQ ID NO: 600 is the determined cDNA sequence for clone CS1-187.

[0641] SEQ ID NO: 601 is the determined cDNA sequence for clone CS1-190.

[0642] SEQ ID NO: 602 is the determined cDNA sequence for clone CS1-194.

[0643] SEQ ID NO: 603 is the determined cDNA sequence for clone CS1-195.

[0644] SEQ ID NO: 604 is the determined cDNA sequence for clone CS1-196.

[0645] SEQ ID NO: 605 is the determined cDNA sequence for clone CS1-197.

[0646] SEQ ID NO: 606 is the determined cDNA sequence for clone CS1-200.

[0647] SEQ ID NO: 607 is the determined cDNA sequence for clone CS1-206.

[0648] SEQ ID NO: 608 is the determined cDNA sequence for clone CS1-207.

[0649] SEQ ID NO: 609 is the determined cDNA sequence for clone CS1-234.

[0650] SEQ ID NO: 610 is the determined cDNA sequence for clone CS1-238.

[0651] SEQ ID NO: 611 is the determined cDNA sequence for clone CS1-239.

[0652] SEQ ID NO: 612 is the determined cDNA sequence for clone CS1-243.

[0653] SEQ ID NO: 613 is the determined cDNA sequence for clone CS1-246.

[0654] SEQ ID NO: 614 is the determined cDNA sequence for clone CS1-249.

[0655] SEQ ID NO: 615 is the determined cDNA sequence for clone CS1-250.

[0656] SEQ ID NO: 616 is the determined cDNA sequence for clone CS1-252.

[0657] SEQ ID NO: 617 is the determined cDNA sequence for clone CT502.

[0658] SEQ ID NO: 618 is the determined cDNA sequence for clone CT507.

[0659] SEQ ID NO: 619 is the determined cDNA sequence for clone CT521.

[0660] SEQ ID NO: 620 is the determined cDNA sequence for clone CT544.

[0661] SEQ ID NO: 621 is the determined cDNA sequence for clone CT577.

[0662] SEQ ID NO: 622 is the determined cDNA sequence for clone CT580.

[0663] SEQ ID NO: 623 is the determined cDNA sequence for clone CT594 (also referred to by clone ID 27540).

[0664] SEQ ID NO: 624 is the determined cDNA sequence for clone CT606.

[0665] SEQ ID NO: 625 is the determined cDNA sequence for clone CT607.

[0666] SEQ ID NO: 626 is the determined cDNA sequence for clone CT599.

[0667] SEQ ID NO: 627 is the determined cDNA sequence for clone CT632.

[0668] SEQ ID NO: 628 is the determined cDNA sequence for clone 35691.

[0669] SEQ ID NO: 629 is the determined cDNA sequence for clone 35707.

[0670] SEQ ID NO: 630 is the determined cDNA sequence for clone CSE-2.

[0671] SEQ ID NO: 631 is the amino acid sequence for clone CSE-2.

[0672] SEQ ID NO: 632 is the determined cDNA sequence for clone CT2-1.

[0673] SEQ ID NO: 633 is the determined cDNA sequence for clone CT2-6.

[0674] SEQ ID NO: 634 is the determined cDNA sequence for clone CT2-8 which shows similarity to SEQ ID NOs:1112 and 1116.

[0675] SEQ ID NO: 635 is the determined cDNA sequence for clone CT2-9.

[0676] SEQ ID NO: 636 is the determined cDNA sequence for clone CT2-12.

[0677] SEQ ID NO: 637 is the determined cDNA sequence for clone CT2-15.

[0678] SEQ ID NO: 638 is the determined cDNA sequence for clone CT2-16.

[0679] SEQ ID NO: 639 is the determined cDNA sequence for clone CT2-17.

[0680] SEQ ID NO: 640 is the determined cDNA sequence for clone CT2-19.

[0681] SEQ ID NO: 641 is the determined cDNA sequence for clone CT2-23.

[0682] SEQ ID NO: 642 is the determined cDNA sequence for clone CT2-25.

[0683] SEQ ID NO: 643 is the determined cDNA sequence for clone CT2-27.

[0684] SEQ ID NO: 644 is the determined cDNA sequence for clone CT2-35.

[0685] SEQ ID NO: 645 is the determined cDNA sequence for clone CT2-39.

[0686] SEQ ID NO: 646 is the determined cDNA sequence for clone CT2-41.

[0687] SEQ ID NO: 647 is the determined cDNA sequence for clone CT2-43.

[0688] SEQ ID NO: 648 is the determined cDNA sequence for clone CT2-44.

[0689] SEQ ID NO: 649 is the determined cDNA sequence for clone CT2-53.

[0690] SEQ ID NO: 650 is the determined cDNA sequence for clone CT2-54.

[0691] SEQ ID NO: 651 is the determined cDNA sequence for clone CT2-55.

[0692] SEQ ID NO: 652 is the determined cDNA sequence for clone CT2-57.

[0693] SEQ ID NO: 653 is the determined cDNA sequence for clone CT2-60.

[0694] SEQ ID NO: 654 is the determined cDNA sequence for clone CT2-64.

[0695] SEQ ID NO: 655 is the determined cDNA sequence for clone CT2-67.

[0696] SEQ ID NO: 656 is the determined cDNA sequence for clone CT2-68.

[0697] SEQ ID NO: 657 is the determined cDNA sequence for clone CT2-75.

[0698] SEQ ID NO: 658 is the determined cDNA sequence for clone CT2-79.

[0699] SEQ ID NO: 659 is the determined cDNA sequence for clone CT2-109.

[0700] SEQ ID NO: 660 is the determined cDNA sequence for clone CT2-112

[0701] SEQ ID NO: 661 is the determined cDNA sequence for clone CT2-127.

[0702] SEQ ID NO: 662 is the determined cDNA sequence for clone CT2-129.

[0703] SEQ ID NO: 663 is the determined cDNA sequence for clone CT2-156.

[0704] SEQ ID NO: 664 is the determined cDNA sequence for clone CT2-162.

[0705] SEQ ID NO: 665 is the determined cDNA sequence for clone CT2-167.

[0706] SEQ ID NO: 666 is the determined cDNA sequence for clone CT2-169

[0707] SEQ ID NO: 667 is the determined cDNA sequence for clone CT2-172.

[0708] SEQ ID NO: 668 is the determined cDNA sequence for clone CT2-173.

[0709] SEQ ID NO: 669 is the determined cDNA sequence for clone CT2-174.

[0710] SEQ ID NO: 670 is the determined cDNA sequence for clone CT2-177.

[0711] SEQ ID NO: 671 is the determined cDNA sequence for clone CT2-181.

[0712] SEQ ID NO: 672 is the determined cDNA sequence for clone CT2-191.

[0713] SEQ ID NO: 673 is the determined cDNA sequence for clone CT2-192.

[0714] SEQ ID NO: 674 is the determined cDNA sequence for clone CT2-207.

[0715] SEQ ID NO: 675 is the determined cDNA sequence for clone CT2-222.

[0716] SEQ ID NO: 676 is the determined cDNA sequence for clone CT2-223.

[0717] SEQ ID NO: 677 is the determined cDNA sequence for clone CT2-233.

[0718] SEQ ID NO: 678 is the determined cDNA sequence for clone CT2-244.

[0719] SEQ ID NO: 679 is the determined cDNA sequence for clone CT2-257.

[0720] SEQ ID NO: 680 is the determined cDNA sequence for clone CT2-279.

[0721] SEQ ID NO: 681 is the determined cDNA sequence for clone CT2-288.

[0722] SEQ ID NO: 682 is the determined cDNA sequence for clone CT2-291.

[0723] SEQ ID NO:683 is the full-length cDNA sequence for human PAC (SEQ ID NOs: 18 and 19).

[0724] SEQ ID NO:684 is the full-length cDNA sequence for murine homologue of human PAC (SEQ ID NO: 683).

[0725] SEQ ID NO:685 is the predicted amino acid sequence for the clone of SEQ ID NO:683.

[0726] SEQ ID NO:686 is a longer determined cDNA sequence for clone CoSub-19 (SEQ ID NO:138).

[0727] SEQ ID NO:687 is the predicted amino acid sequence for the clone of SEQ ID NO:686.

[0728] SEQ ID NO:688 is the nucleotide sequence of the M13 forward primer.

[0729] SEQ ID NO:689 is the nucleotide sequence of the M13 reverse primer.

[0730] SEQ ID NO:690 is a longer determined cDNA sequence for C799P (SEQ ID NO:40), showing homology to homo sapiens NADH/NADPH thyroid oxidase p138-tox mRNA.

[0731] SEQ ID NO:691 is a longer determined cDNA sequence for C794P (SEQ ID NO:41).

[0732] SEQ ID NO:692 is the predicted amino acid sequence for the clone of SEQ ID NO:690;

[0733] SEQ ID NO:693 is the predicted amino acid sequence for the clone of SEQ ID NO:691.

[0734] SEQ ID NO: 694 is the determined cDNA sequence for clone R0093:A03.

[0735] SEQ ID NO: 695 is the determined cDNA sequence for clone R0093:A10.

[0736] SEQ ID NO: 696 is the determined cDNA sequence for clone R0093:A11.

[0737] SEQ ID NO: 697 is the determined cDNA sequence for clone R0093:A12.

[0738] SEQ ID NO: 698 is the determined cDNA sequence for clone R0093:B03.

[0739] SEQ ID NO: 699 is the determined cDNA sequence for clone R0093:B04.

[0740] SEQ ID NO: 700 is the determined cDNA sequence for clone R0093:B09.

[0741] SEQ ID NO: 701 is the determined cDNA sequence for clone R0093:B10.

[0742] SEQ ID NO: 702 is the determined cDNA sequence for clone R0093:B11.

[0743] SEQ ID NO: 703 is the determined cDNA sequence for clone R0093:B12.

[0744] SEQ ID NO: 704 is the determined cDNA sequence for clone R0093:C01.

[0745] SEQ ID NO: 705 is the determined cDNA sequence for clone R0093:C03.

[0746] SEQ ID NO: 706 is the determined cDNA sequence for clone R0093:C04.

[0747] SEQ ID NO: 707 is the determined cDNA sequence for clone R0093:C06.

[0748] SEQ ID NO: 708 is the determined cDNA sequence for clone R0093:C08.

[0749] SEQ ID NO: 709 is the determined cDNA sequence for clone R0093:C09.

[0750] SEQ ID NO: 710 is the determined cDNA sequence for clone R0093:C1O.

[0751] SEQ ID NO: 711 is the determined cDNA sequence for clone R0093:C11.

[0752] SEQ ID NO: 712 is the determined cDNA sequence for clone R0093:C12.

[0753] SEQ ID NO: 713 is the determined cDNA sequence for clone R0093:D01.

[0754] SEQ ID NO: 714 is the determined cDNA sequence for clone R0093:D02.

[0755] SEQ ID NO: 715 is the determined cDNA sequence for clone R0093:D03.

[0756] SEQ ID NO: 716 is the determined cDNA sequence for clone R0093:D04.

[0757] SEQ ID NO: 717 is the determined cDNA sequence for clone R0093:D05.

[0758] SEQ ID NO: 718 is the determined cDNA sequence for clone R0093:D06.

[0759] SEQ ID NO: 719 is the determined cDNA sequence for clone R0093:D07.

[0760] SEQ ID NO: 720 is the determined cDNA sequence for clone R0093:D08.

[0761] SEQ ID NO: 721 is the determined cDNA sequence for clone R0093:D10.

[0762] SEQ ID NO: 722 is the determined cDNA sequence for clone R0093:D11.

[0763] SEQ ID NO: 723 is the determined cDNA sequence for clone R0093:E02.

[0764] SEQ ID NO: 724 is the determined cDNA sequence for clone R0093:E03.

[0765] SEQ ID NO: 725 is the determined cDNA sequence for clone R0093:E04.

[0766] SEQ ID NO: 726 is the determined cDNA sequence for clone R0093:E06.

[0767] SEQ ID NO: 727 is the determined cDNA sequence for clone R0093:E07.

[0768] SEQ ID NO: 728 is the determined cDNA sequence for clone R0093:E08.

[0769] SEQ ID NO: 729 is the determined cDNA sequence for clone R0093:E09.

[0770] SEQ ID NO: 730 is the determined cDNA sequence for clone R0093:E10.

[0771] SEQ ID NO: 731 is the determined cDNA sequence for clone R0093:E11.

[0772] SEQ ID NO: 732 is the determined cDNA sequence for clone R0093:F02.

[0773] SEQ ID NO: 733 is the determined cDNA sequence for clone R0093:F03.

[0774] SEQ ID NO: 734 is the determined cDNA sequence for clone R0093:F04.

[0775] SEQ ID NO: 735 is the determined cDNA sequence for clone R0093:F05.

[0776] SEQ ID NO: 736 is the determined cDNA sequence for clone R0093:F06.

[0777] SEQ ID NO: 737 is the determined cDNA sequence for clone R0093:F08.

[0778] SEQ ID NO: 738 is the determined cDNA sequence for clone R0093:F09.

[0779] SEQ ID NO: 739 is the determined cDNA sequence for clone R0093:F10.

[0780] SEQ ID NO: 740 is the determined cDNA sequence for clone R0093:F12.

[0781] SEQ ID NO: 741 is the determined cDNA sequence for clone R0093:G01.

[0782] SEQ ID NO: 742 is the determined cDNA sequence for clone R0093:G03.

[0783] SEQ ID NO: 743 is the determined cDNA sequence for clone R0093:G04.

[0784] SEQ ID NO: 744 is the determined cDNA sequence for clone R0093:G06.

[0785] SEQ ID NO: 745 is the determined cDNA sequence for clone R0093:G07.

[0786] SEQ ID NO: 746 is the determined cDNA sequence for clone R0093:G08.

[0787] SEQ ID NO: 747 is the determined cDNA sequence for clone R0093:G09.

[0788] SEQ ID-NO: 748 is the determined cDNA sequence for clone R0093:G10.

[0789] SEQ ID NO: 749 is the determined cDNA sequence for clone R0093:G11.

[0790] SEQ ID NO: 750 is the determined cDNA sequence for clone R0093:G12.

[0791] SEQ ID NO: 751 is the determined cDNA sequence for clone R0093:H02.

[0792] SEQ ID NO: 752 is the determined cDNA sequence for clone R0093:H03.

[0793] SEQ ID.NO: 753 is the determined cDNA sequence for clone R0093:H04.

[0794] SEQ ID NO: 754 is the determined cDNA sequence for clone R0093:H05.

[0795] SEQ ID NO: 755 is the determined cDNA sequence for clone R0093:H07.

[0796] SEQ ID NO: 756 is the determined cDNA sequence for clone R0093:H08.

[0797] SEQ ID NO: 757 is the determined cDNA sequence for clone R0093:H09.

[0798] SEQ ID NO: 758 is the determined cDNA sequence for clone R0093:H10.

[0799] SEQ ID NO: 759 is the determined cDNA sequence for clone R0093:H11.

[0800] SEQ ID NO: 760 is the determined cDNA sequence for clone R0094:A03.

[0801] SEQ ID NO: 761 is the determined cDNA sequence for clone R0094:A05.

[0802] SEQ ID NO: 762 is the determined cDNA sequence for clone R0094:A06.

[0803] SEQ ID NO: 763 is the determined cDNA sequence for clone R0094:A07.

[0804] SEQ ID NO: 764 is the determined cDNA sequence for clone R0094:A09.

[0805] SEQ ID NO: 765 is the determined cDNA sequence for clone R0094:A10.

[0806] SEQ ID NO: 766 is the determined cDNA sequence for clone R0094:A12.

[0807] SEQ ID NO: 767 is the determined cDNA sequence for clone R0094:B03.

[0808] SEQ ID NO: 768 is the determined cDNA sequence for clone R0094:B06.

[0809] SEQ ID NO: 769 is the determined cDNA sequence for clone R0094:B08.

[0810] SEQ ID NO: 770 is the determined cDNA sequence for clone R0094:B11.

[0811] SEQ ID NO: 771 is the determined cDNA sequence for clone R0094:B12.

[0812] SEQ ID NO: 772 is the determined cDNA sequence for clone R0094:C01.

[0813] SEQ ID NO: 773 is the determined cDNA sequence for clone R0094:C02.

[0814] SEQ ID NO: 774 is the determined cDNA sequence for clone R0094:C03.

[0815] SEQ ID NO: 775 is the determined cDNA sequence for clone R0094:C05.

[0816] SEQ ID NO: 776 is the determined cDNA sequence for clone R0094:C06.

[0817] SEQ ID NO: 777 is the determined cDNA sequence for clone R0094:C08.

[0818] SEQ ID NO: 778 is the determined cDNA sequence for clone R0094:C09.

[0819] SEQ ID NO: 779 is the determined cDNA sequence for clone R0094:C10.

[0820] SEQ ID NO: 780 is the determined cDNA sequence for clone R0094:C11.

[0821] SEQ ID NO: 781 is the determined cDNA sequence for clone R0094:C12.

[0822] SEQ ID NO: 782 is the determined cDNA sequence for clone R0094:D01.

[0823] SEQ ID NO: 783 is the determined cDNA sequence for clone R0094:D02.

[0824] SEQ ID NO: 784 is the determined cDNA sequence for clone R0094:D03.

[0825] SEQ ID NO: 785 is the determined cDNA sequence for clone R0094:D04.

[0826] SEQ ID NO: 786 is the determined cDNA sequence for clone R0094:D05.

[0827] SEQ ID NO: 787 is the determined cDNA sequence for clone R0094:D07.

[0828] SEQ ID NO: 788 is the determined cDNA sequence for clone R0094:D08.

[0829] SEQ ID NO: 789 is the determined cDNA sequence for clone R0094:D09.

[0830] SEQ ID NO: 790 is the determined cDNA sequence for clone R0094:D10.

[0831] SEQ ID NO: 791 is the determined cDNA sequence for clone R0094:D12.

[0832] SEQ ID NO: 792 is the determined cDNA sequence for clone R0094:E01.

[0833] SEQ ID NO: 793 is the determined cDNA sequence for clone R0094:E02.

[0834] SEQ ID NO: 794 is the determined cDNA sequence for clone R0094:E03.

[0835] SEQ ID NO: 795 is the determined cDNA sequence for clone R0094:E05.

[0836] SEQ ID NO: 796 is the determined cDNA sequence for clone R0094:E06.

[0837] SEQ ID NO: 797 is the determined cDNA sequence for clone R0094:E07.

[0838] SEQ ID NO: 798 is the determined cDNA sequence for clone R0094:E08.

[0839] SEQ ID NO: 799 is the determined cDNA sequence for clone R0094:E09.

[0840] SEQ ID NO: 800 is the determined cDNA sequence for clone R0094:E10.

[0841] SEQ ID NO: 801 is the determined cDNA sequence for clone R0094:E11.

[0842] SEQ ID NO: 802 is the determined cDNA sequence for clone R0094:E12.

[0843] SEQ ID NO: 803 is the determined cDNA sequence for clone R0094:F01.

[0844] SEQ ID NO: 804 is the determined cDNA sequence for clone R0094:F03.

[0845] SEQ ID NO: 805 is the determined cDNA sequence for clone R0094:F05.

[0846] SEQ ID NO: 806 is the determined cDNA sequence for clone R0094:F06.

[0847] SEQ ID NO: 807 is the determined cDNA sequence for clone R0094:F07.

[0848] SEQ ID NO: 808 is the determined cDNA sequence for clone R0094:F08.

[0849] SEQ ID NO: 809 is the determined cDNA sequence for clone R0094:F09.

[0850] SEQ ID NO: 810 is the determined cDNA sequence for clone R0094:F10.

[0851] SEQ ID NO: 811 is the determined cDNA sequence for clone R0094:F11.

[0852] SEQ ID NO: 812 is the determined cDNA sequence for clone R0094:F12.

[0853] SEQ ID NO: 813 is the determined cDNA sequence for clone R0094:G02.

[0854] SEQ ID NO: 814 is the determined cDNA sequence for clone R0094:G03.

[0855] SEQ ID NO: 815 is the determined cDNA sequence for clone R0094:G04.

[0856] SEQ ID NO: 816 is the determined cDNA sequence for clone R0094:G06.

[0857] SEQ ID NO: 817 is the determined cDNA sequence for clone R0094:G07.

[0858] SEQ ID NO: 818 is the determined cDNA sequence for clone R0094:G08.

[0859] SEQ ID NO: 819 is the determined cDNA sequence for clone R0094:G10.

[0860] SEQ ID NO: 820 is the determined cDNA sequence for clone R0094:G11.

[0861] SEQ ID NO: 821 is the determined cDNA sequence for clone R0094:G12.

[0862] SEQ ID NO: 822 is the determined cDNA sequence for clone R0094:H01.

[0863] SEQ ID NO: 823 is the determined cDNA sequence for clone R0094:H03.

[0864] SEQ ID NO: 824 is the determined cDNA sequence for clone R0094:H04.

[0865] SEQ ID NO: 825 is the determined cDNA sequence for clone R0094:H05.

[0866] SEQ ID NO: 826 is the determined cDNA sequence for clone R0094:H06.

[0867] SEQ ID NO: 827 is the determined cDNA sequence for clone R0094:H08.

[0868] SEQ ID NO: 828 is the determined cDNA sequence for clone R0094:H09.

[0869] SEQ ID NO: 829 is the determined cDNA sequence for clone R0094:H10.

[0870] SEQ ID NO: 830 is the determined cDNA sequence for clone R0094:H11.

[0871] SEQ ID NO: 831 is the determined cDNA sequence for clone R0095:A03.

[0872] SEQ ID NO: 832 is the determined cDNA sequence for clone R0095:A06.

[0873] SEQ ID NO: 833 is the determined cDNA sequence for clone R0095:A07.

[0874] SEQ ID NO: 834 is the determined cDNA sequence for clone R0095:B01.

[0875] SEQ ID NO: 835 is the determined cDNA sequence for clone R0095:B02.

[0876] SEQ ID NO: 836 is the determined cDNA sequence for clone R0095:B03.

[0877] SEQ ID NO: 837 is the determined cDNA sequence for clone R0095:B04.

[0878] SEQ ID NO: 838 is the determined cDNA sequence for clone R0095:B05.

[0879] SEQ ID NO: 839 is the determined cDNA sequence for clone R0095:B06.

[0880] SEQ ID NO: 840 is the determined cDNA sequence for clone R0095:B10.

[0881] SEQ ID NO: 841 is the determined cDNA sequence for clone R0095:B11.

[0882] SEQ ID NO: 842 is the determined cDNA sequence for clone R0095:B12.

[0883] SEQ ID NO: 843 is the determined cDNA sequence for clone R0095:C01.

[0884] SEQ ID NO: 844 is the determined cDNA sequence for clone R0095:C03.

[0885] SEQ ID NO: 845 is the determined cDNA sequence for clone R0095:C04.

[0886] SEQ ID NO: 846 is the determined cDNA sequence for clone R0095:C05.

[0887] SEQ ID NO: 847 is the determined cDNA sequence for clone R0095:C06.

[0888] SEQ ID NO: 848 is the determined cDNA sequence for clone R0095:C07.

[0889] SEQ ID NO: 849 is the determined cDNA sequence for clone R0095:C08.

[0890] SEQ ID NO: 850 is the determined cDNA sequence for clone R0095:C10.

[0891] SEQ ID NO: 851 is the determined cDNA sequence for clone R0095:C12.

[0892] SEQ ID NO: 852 is the determined cDNA sequence for clone R0095:D01.

[0893] SEQ ID NO: 853 is the determined cDNA sequence for clone R0095:D03.

[0894] SEQ ID NO: 854 is the determined cDNA sequence for clone R0095:D04.

[0895] SEQ ID NO: 855 is the determined cDNA sequence for clone R0095:D06.

[0896] SEQ ID NO: 856 is the determined cDNA sequence for clone R0095:D07.

[0897] SEQ ID NO: 857 is the determined cDNA sequence for clone R0095:D08.

[0898] SEQ ID NO: 858 is the determined cDNA sequence for clone R0095:D09.

[0899] SEQ ID NO: 859 is the determined cDNA sequence for clone R0095:D11.

[0900] SEQ ID NO: 860 is the determined cDNA sequence for clone R0095:D12.

[0901] SEQ ID NO: 861 is the determined cDNA sequence for clone R0095:E01.

[0902] SEQ ID NO: 862 is the determined cDNA sequence for clone R0095:E02.

[0903] SEQ ID NO: 863 is the determined cDNA sequence for clone R0095:E04.

[0904] SEQ ID NO: 864 is the determined cDNA sequence for clone R0095:E05.

[0905] SEQ ID NO: 865 is the determined cDNA sequence for clone R0095:E06.

[0906] SEQ ID NO: 866 is the determined cDNA sequence for clone R0095:E07.

[0907] SEQ ID NO: 867 is the determined cDNA sequence for clone R0095:E08.

[0908] SEQ ID NO: 868 is the determined cDNA sequence for clone R0095:E11.

[0909] SEQ ID NO: 869 is the determined cDNA sequence for clone R0095:E12.

[0910] SEQ ID NO: 870 is the determined cDNA sequence for clone R0095:F01.

[0911] SEQ ID NO: 871 is the determined cDNA sequence for clone R0095:F03.

[0912] SEQ ID NO: 872 is the determined cDNA sequence for clone R0095:F06.

[0913] SEQ ID NO: 873 is the determined cDNA sequence for clone R0095:F10.

[0914] SEQ ID NO: 874 is the determined cDNA sequence for clone R0095:F11.

[0915] SEQ ID NO: 875 is the determined cDNA sequence for clone R0095:G02.

[0916] SEQ ID NO: 876 is the determined cDNA sequence for clone R0095:G03.

[0917] SEQ ID NO: 877 is the determined cDNA sequence for clone R0095:G04.

[0918] SEQ ID NO: 878 is the determined cDNA sequence for clone R0095:G08.

[0919] SEQ ID NO: 879 is the determined cDNA sequence for clone R0095:G09.

[0920] SEQ ID NO: 880 is the determined cDNA sequence for clone R0095:G10.

[0921] SEQ ID NO: 881 is the determined cDNA sequence for clone R0095:H01.

[0922] SEQ ID NO: 882 is the determined cDNA sequence for clone R0095:H02.

[0923] SEQ ID NO: 883 is the determined cDNA sequence for clone. R0095:H04.

[0924] SEQ ID NO: 884 is the determined cDNA sequence.for clone R0095:H06.

[0925] SEQ ID NO: 885 is the determined cDNA sequence for clone R0095:H07.

[0926] SEQ ID NO: 886 is the determined cDNA sequence for clone R0095:H09.

[0927] SEQ ID NO: 887 is the determined cDNA sequence for clone R0096:A02.

[0928] SEQ ID NO: 888 is the determined cDNA sequence for clone R0096:A08.

[0929] SEQ ID NO: 889 is the determined cDNA sequence for clone R0096:A09.

[0930] SEQ ID NO: 890 is the determined cDNA sequence for clone R0096:A10.

[0931] SEQ ID NO: 891 is the determined cDNA sequence for clone R0096:A11.

[0932] SEQ ID NO: 892 is the determined cDNA sequence for clone R0096:A12.

[0933] SEQ ID NO: 893 is the determined cDNA sequence for clone R0096:B02.

[0934] SEQ ID NO: 894 is the determined cDNA sequence for clone R0096:B03.

[0935] SEQ ID NO: 895 is the determined cDNA sequence for clone R0096:B04.

[0936] SEQ ID NO: 896 is the determined cDNA sequence for clone R0096:B05.

[0937] SEQ ID NO: 897 is the determined cDNA sequence for clone R0096:B06.

[0938] SEQ ID NO: 898 is the determined cDNA sequence for clone R0096:B07.

[0939] SEQ ID NO: 899 is the determined cDNA sequence for clone R0096:B08.

[0940] SEQ ID NO: 900 is the determined cDNA sequence for clone R0096:B09.

[0941] SEQ ID NO: 901 is the determined cDNA sequence for clone R0096:B10.

[0942] SEQ ID NO: 902 is the determined cDNA sequence for clone R0096:B11.

[0943] SEQ ID NO: 903 is the determined cDNA sequence for clone R0096:B12.

[0944] SEQ ID NO: 904 is the determined cDNA sequence for clone R0096:C01.

[0945] SEQ ID NO: 905 is the determined cDNA sequence for clone R0096:C03.

[0946] SEQ ID NO: 906 is the determined cDNA sequence for clone R0096:C04.

[0947] SEQ ID NO: 907 is the determined cDNA sequence for clone R0096:C05.

[0948] SEQ ID NO: 908 is the determined cDNA sequence for clone R0096:C06.

[0949] SEQ ID NO: 909 is the determined cDNA sequence for clone R0096:C07.

[0950] SEQ ID NO: 910 is the determined cDNA sequence for clone R0096:C08.

[0951] SEQ ID NO: 911 is the determined cDNA sequence for clone R0096:C09.

[0952] SEQ ID NO: 912 is the determined cDNA sequence for clone R0096:C10.

[0953] SEQ ID NO: 913 is the determined cDNA sequence for clone R0096:C11.

[0954] SEQ ID NO: 914 is the determined cDNA sequence for clone R0096:C12.

[0955] SEQ ID NO: 915 is the determined cDNA sequence for clone R0096:D01.

[0956] SEQ ID NO: 916 is the determined cDNA sequence for clone R0096:D02.

[0957] SEQ ID NO: 917 is the determined cDNA sequence for clone R0096:D03.

[0958] SEQ ID NO: 918 is the determined cDNA sequence for clone R0096:D04.

[0959] SEQ ID NO: 919 is the determined cDNA sequence for clone R0096:D05.

[0960] SEQ ID NO: 920 is the determined cDNA sequence for clone R0096:D08.

[0961] SEQ ID NO: 921 is the determined cDNA sequence for clone R0096:D09.

[0962] SEQ ID NO: 922 is the determined cDNA sequence for clone R0096:D10.

[0963] SEQ ID NO: 923 is the determined cDNA sequence for clone R0096:D12.

[0964] SEQ ID NO: 924 is the determined cDNA sequence for clone R0096:E01.

[0965] SEQ ID NO: 925 is the determined cDNA sequence for clone R0096:E02.

[0966] SEQ ID NO: 926 is the determined cDNA sequence for clone R0096:E03.

[0967] SEQ ID NO: 927 is the determined cDNA sequence for clone R0096:E04.

[0968] SEQ ID NO: 928 is the determined cDNA sequence for clone R0096:E05.

[0969] SEQ ID NO: 929 is the determined cDNA sequence for clone R0096:E06.

[0970] SEQ ID NO: 930 is the determined cDNA sequence for clone R0096:E08.

[0971] SEQ ID NO: 931 is the determined cDNA sequence for clone R0096:E09.

[0972] SEQ ID NO: 932 is the determined cDNA sequence for clone R0096:E10.

[0973] SEQ ID NO: 933 is the determined cDNA sequence for clone R0096:E11.

[0974] SEQ ID NO: 934 is the determined cDNA sequence for clone R0096:E12.

[0975] SEQ ID NO: 935 is the determined cDNA sequence for clone R0096:F01.

[0976] SEQ ID NO: 936 is the determined cDNA sequence for clone R0096:F02.

[0977] SEQ ID NO: 937 is the determined cDNA sequence for clone R0096:F03.

[0978] SEQ ID NO: 938 is the determined cDNA sequence for clone R0096:F04.

[0979] SEQ ID NO: 939 is the determined cDNA sequence for clone R0096:F05.

[0980] SEQ ID NO: 940 is the determined cDNA sequence for clone R0096:F07.

[0981] SEQ ID NO: 941 is the determined cDNA sequence for clone R0096:F10.

[0982] SEQ ID NO: 942 is the determined cDNA sequence for clone R0096:F11.

[0983] SEQ ID NO: 943 is the determined cDNA sequence for clone R0096:G01.

[0984] SEQ ID NO: 944 is the determined cDNA sequence for clone R0096:G03.

[0985] SEQ ID NO: 945 is the determined cDNA sequence for clone R0096:G04.

[0986] SEQ ID NO: 946 is the determined cDNA sequence for clone R0096:G05.

[0987] SEQ ID NO: 947 is the determined cDNA sequence for clone R0096:G06.

[0988] SEQ ID NO: 948 is the determined cDNA sequence for clone R0096:G07.

[0989] SEQ ID NO: 949 is the determined cDNA sequence for clone R0096:G09.

[0990] SEQ ID NO: 950 is the determined cDNA sequence for clone R0096:G10.

[0991] SEQ ID NO: 951 is the determined cDNA sequence for clone R0096:G12.

[0992] SEQ ID NO: 952 is the determined cDNA sequence for clone R0096:H01.

[0993] SEQ ID NO: 953 is the determined cDNA sequence for clone R0096:H02.

[0994] SEQ ID NO: 954 is the determined cDNA sequence for clone R0096:H03.

[0995] SEQ ID NO: 955 is the determined cDNA sequence for clone R0096:H07.

[0996] SEQ ID NO: 956 is the determined cDNA sequence for clone R0096:H08.

[0997] SEQ ID NO: 957 is the determined cDNA sequence for clone R0097:A05.

[0998] SEQ ID NO: 958 is the determined cDNA sequence for clone R0097:A06.

[0999] SEQ ID NO: 959 is the determined cDNA sequence for clone R0097:A10.

[1000] SEQ ID NO: 960 is the determined cDNA sequence for clone R0097:A11.

[1001] SEQ ID NO: 961 is the determined cDNA sequence for clone R0097:B01.

[1002] SEQ ID NO: 962 is the determined cDNA sequence for clone R0097:B03.

[1003] SEQ ID NO: 963 is the determined cDNA sequence for clone R0097:B04.

[1004] SEQ ID NO: 964 is the determined cDNA sequence for clone R0097:B05.

[1005] SEQ ID NO: 965 is the determined cDNA sequence for clone R0097:B06.

[1006] SEQ ID NO: 966 is the determined cDNA sequence for clone R0097:B07.

[1007] SEQ ID NO: 967 is the determined cDNA sequence for clone R0097:B11.

[1008] SEQ ID NO: 968 is the determined cDNA sequence for clone R0097:C01.

[1009] SEQ ID NO: 969 is the determined cDNA sequence for clone R0097:C02.

[1010] SEQ ID NO: 970 is the determined cDNA sequence for clone R0097:C03.

[1011] SEQ ID NO: 971 is the determined cDNA sequence for clone R0097:C04.

[1012] SEQ ID NO: 972 is the determined cDNA sequence for clone R0097:C05.

[1013] SEQ ID NO: 973 is the determined cDNA sequence for clone R0097:C07.

[1014] SEQ ID NO: 974 is the determined cDNA sequence for clone R0097:C08.

[1015] SEQ ID NO: 975 is the determined cDNA sequence for clone R0097:C09.

[1016] SEQ ID NO: 976 is the determined cDNA sequence for clone R0097:C10.

[1017] SEQ ID NO: 977 is the determined cDNA sequence for clone R0097:D01.

[1018] SEQ ID NO: 978 is the determined cDNA sequence for clone R0097:D08.

[1019] SEQ ID NO: 979 is the determined cDNA sequence for clone R0097:E02.

[1020] SEQ ID NO: 980 is the determined cDNA sequence for clone R0097:E09.

[1021] SEQ ID NO: 981 is the determined cDNA sequence for clone R0097:E11.

[1022] SEQ ID NO: 982 is the determined cDNA sequence for clone R0097:F01.

[1023] SEQ ID NO: 983 is the determined cDNA sequence for clone R0097:F11.

[1024] SEQ ID NO: 984 is the determined cDNA sequence for clone R0097:G01.

[1025] SEQ ID NO: 985 is the determined cDNA sequence for clone R0097:G11.

[1026] SEQ ID NO: 986 is the determined cDNA sequence for clone R0097:G12.

[1027] SEQ ID NO: 987 is the determined cDNA sequence for clone R0097:H01.

[1028] SEQ ID NO: 988 is the determined cDNA sequence for clone R0097:H02.

[1029] SEQ ID NO: 989 is the determined cDNA sequence for clone R0097:H04.

[1030] SEQ ID NO: 990 is the determined cDNA sequence for clone R0097:H06.

[1031] SEQ ID NO: 991 is the determined cDNA sequence for clone R0097:H07.

[1032] SEQ ID NO: 992 is the determined cDNA sequence for clone R0097:H09.

[1033] SEQ ID NO: 993 is the determined cDNA sequence for clone R0097:H11.

[1034] SEQ ID NO: 994 is the determined cDNA sequence for clone R0098:A03.

[1035] SEQ ID NO: 995 is the determined cDNA sequence for clone R0098:A05.

[1036] SEQ ID NO: 996 is the determined cDNA sequence for clone R0098:A06.

[1037] SEQ ID NO: 997 is the determined cDNA sequence for clone R0098:A10.

[1038] SEQ ID NO: 998 is the determined cDNA sequence for clone R0098:A12.

[1039] SEQ ID NO: 999 is the determined cDNA sequence for clone R0098:B01.

[1040] SEQ ID NO: 1000 is the determined cDNA sequence for clone R0098:B02.

[1041] SEQ ID NO: 1001 is the determined cDNA sequence for clone R0098:B05.

[1042] SEQ ID NO: 1002 is the determined cDNA sequence for clone R0098:B06.

[1043] SEQ ID NO: 1003 is the determined cDNA sequence for clone R0098:B10.

[1044] SEQ ID NO: 1004 is the determined cDNA sequence for clone R0098:C03.

[1045] SEQ ID NO: 1005 is the determined cDNA sequence for clone R0098:C04.

[1046] SEQ ID NO: 1006 is the determined cDNA sequence for clone R0098:C05.

[1047] SEQ ID NO: 1007 is the determined cDNA sequence for clone R0098:C10.

[1048] SEQ ID NO: 1008 is the determined cDNA sequence for clone R0098:C11.

[1049] SEQ ID NO: 1009 is the determined cDNA sequence for clone R0098:D01.

[1050] SEQ ID NO: 1010 is the determined cDNA sequence for clone R0098:D02.

[1051] SEQ ID NO: 1011 is the determined cDNA sequence for clone R0098:D07.

[1052] SEQ ID NO: 1012 is the determined cDNA sequence for clone R0098:D08.

[1053] SEQ ID NO: 1013 is the determined cDNA sequence for clone R0098:D09.

[1054] SEQ ID NO: 1014 is the determined cDNA sequence for clone R0098:D10.

[1055] SEQ ID NO: 1015 is the determined cDNA sequence for clone R0098:D11.

[1056] SEQ ID NO: 1016 is the determined cDNA sequence for clone R0098:D12.

[1057] SEQ ID NO: 1017 is the determined cDNA sequence for clone R0098:E01.

[1058] SEQ ID NO: 1018 is the determined cDNA sequence for clone R0098:E04.

[1059] SEQ ID NO: 1019 is the determined cDNA sequence for clone R0098:E05.

[1060] SEQ ID NO: 1020 is the determined cDNA sequence for clone R0098:E06.

[1061] SEQ ID NO: 1021 is the determined cDNA sequence for clone R0098:E07.

[1062] SEQ ID NO: 1022 is the determined cDNA sequence for clone R0098:E11.

[1063] SEQ ID NO: 1023 is the determined cDNA sequence for clone R0098:F04.

[1064] SEQ ID NO: 1024 is the determined cDNA sequence for clone R0098:F05.

[1065] SEQ ID NO: 1025 is the determined cDNA sequence for clone R0098:F06.

[1066] SEQ ID NO: 1026 is the determined cDNA sequence for clone R0098:F07.

[1067] SEQ ID NO: 1027 is the determined cDNA sequence for clone R0098:F08.

[1068] SEQ ID NO: 1028 is the determined cDNA sequence for clone R0098:F09.

[1069] SEQ ID NO: 1029 is the determined cDNA sequence for clone R0098:F10.

[1070] SEQ ID NO: 1030 is the determined cDNA sequence for clone R0098:F11.

[1071] SEQ ID NO: 1031 is the determined cDNA sequence for clone R0098:F12.

[1072] SEQ ID NO: 1032 is the determined cDNA sequence for clone R0098:G02.

[1073] SEQ ID NO: 1033 is the determined cDNA sequence for clone R0098:G03.

[1074] SEQ ID NO: 1034 is the determined cDNA sequence for clone R0098:G05.

[1075] SEQ ID NO: 1035 is the determined cDNA sequence for clone R0098:G06.

[1076] SEQ ID NO: 1036 is the determined cDNA sequence for clone R0098:G07.

[1077] SEQ ID NO: 1037 is the determined cDNA sequence for clone R0098:G08.

[1078] SEQ ID NO: 1038 is the determined cDNA sequence for clone R0098:G09.

[1079] SEQ ID NO: 1039 is the determined cDNA sequence for clone R0098:G10.

[1080] SEQ ID NO: 1040 is the determined cDNA sequence for clone R0098:G11.

[1081] SEQ ID NO: 1041 is the determined cDNA sequence for clone R0098:G12.

[1082] SEQ ID NO: 1042 is the determined cDNA sequence for clone R0098:H02.

[1083] SEQ ID NO: 1043 is the determined cDNA sequence for clone R0098:H03.

[1084] SEQ ID NO: 1044 is the determined cDNA sequence for clone R0098:H04.

[1085] SEQ ID NO: 1045 is the determined cDNA sequence for clone R0098:H05.

[1086] SEQ ID NO: 1046 is the determined cDNA sequence for clone R0098:H07.

[1087] SEQ ID NO: 1047 is the determined cDNA sequence for clone R0098:H08.

[1088] SEQ ID NO: 1048 is the determined cDNA sequence for clone R0098:H11.

[1089] SEQ ID NO: 1049 is the determined cDNA sequence for clone C878P which shows sequence similarity to homo sapiens cDNA FLJ10884 fis, clone NT2RP4001950 and homo sapiens cDNA FLJ 1111 fis, clone PLACE 1005923.

[1090] SEQ ID NO: 1050 is the determined cDNA sequence for clone C882P which shows sequence similarity to homo sapiens cDNA FLJ20116 fis, clone COLO 5655 and homo sapiens cDNA FLJ20740 fis, clone HEP07118.

[1091] SEQ ID NO: 1651 is the determined cDNA sequence for clone C883P which shows sequence similarity to human homeobox protein Cdx2 mRNA.

[1092] SEQ ID NO: 1052 is the determined cDNA sequence for clone C884P which shows sequence similarity to human TM4SF3 (aka, CO-029).

[1093] SEQ ID NO: 1053 is the determined cDNA sequence for clone C886P which shows sequence similarity to human secretory protein (P1.B) mRNA and homo sapiens trefoil factor 3 (intestinal) (TFF3) mRNA.

[1094] SEQ ID NO: 1054 is the determined cDNA sequence for clone C892P which shows sequence similarity to human galectin-4 mRNA.

[1095] SEQ ID NO: 1055 is the determined cDNA sequence for clone C900P which shows sequence similarity to homo sapiens mucin 11 (MUC11) mRNA.

[1096] SEQ ID NO: 1056 is the determined cDNA sequence for clone C902P which shows sequence similarity to homo sapiens calcium-dependent chloride channel-1 (hCLCA1) mRNA.

[1097] SEQ ID NO: 1057 is the determined cDNA sequence for clone C903P which shows sequence similarity to homo sapiens transmembrane mucin 12 (MUC 12) mRNA.

[1098] SEQ ID NO: 1058 is the determined cDNA sequence for clone C899P which shows sequence similarity to homo sapiens intestinal mucin (MUC2) mRNA.

[1099] SEQ ID NO:1059 is the predicted amino acid sequence for the clone of SEQ ID NO: 1049.

[1100] SEQ ID NO: 1060 is the predicted amino acid sequence for the clone of SEQ ID NO: 1050.

[1101] SEQ ID NO:1061 is the predicted amino acid sequence for the clone of SEQ ID NO: 1051.

[1102] SEQ ID NO:1062 is the predicted amino acid sequence for the clone of SEQ ID NO:1052.

[1103] SEQ ID NO: 1063 is the predicted amino acid sequence for the clone of SEQ ID NO:1053.

[1104] SEQ ID NO: 1064 is the predicted amino acid sequence for the clone of SEQ ID NO: 1054.

[1105] SEQ ID NO:1065 is the predicted amino acid sequence for the clone of SEQ ID NO:1055.

[1106] SEQ ID NO:1066 is the predicted amino acid sequence for the clone of SEQ ID NO: 1056.

[1107] SEQ ID NO:1067 is the predicted amino acid sequence for the clone of SEQ ID NO:1057.

[1108] SEQ ID NO: 1068 is the predicted amino acid sequence for the clone of SEQ ID NO: 1058.

[1109] SEQ ID NO:1069 is the full length nucleotide sequence for clone CS1-152 (C880P, C887P).

[1110] SEQ ID NO:1070 is the predicted amino acid sequence for the clone of SEQ ID NO: 1069.

[1111] SEQ ID NO: 1071 is the cDNA sequence for human colon specific gene (geneseq X03195) identified from a computer search of the public geneseq database and which shows similarity to clone C880P.

[1112] SEQ ID NO: 1072 is the cDNA sequence for human protein comprising secretory signal nucleotide sequence 3 (geneseq V29035) identified from a computer search of the public geneseq database and which shows similarity to clone C880P.

[1113] SEQ ID NO:1073 is the cDNA sequence for open reading frame human protein comprising secretory signal 3 (geneseq V29036) identified from a computer search of the public geneseq database and which shows similarity to clone C880P.

[1114] SEQ ID NO:1074 is the cDNA sequence for human colon specific protein cDNA (geneseq T51784) identified from a computer search of the public geneseq database and which shows similarity to clone C880P.

[1115] SEQ ID NO: 1075 is the cDNA sequence for human Reg 1-gamma protein (geneseq V29156) identified from a computer search of the public geneseq database and which shows similarity to clone C880P.

[1116] SEQ ID NO:1076 is the cDNA sequence for human intestinal peptide-associated transporter HPT-1 mRNA, complete cds and homo sapiens mRNA for L1-cadherin (geneseq X18166) identified from a computer search of the public geneseq database and which shows similarity to clone C888P.

[1117] SEQ ID NO:1077 is the amino acid sequence of geneseq record W12691 which shows sequence similarity to clone C880P.

[1118] SEQ ID NO:1078 is the amino acid sequence of geneseq record W37866 which shows sequence similarity to clone C880P.

[1119] SEQ ID NO:1079 is the amino acid sequence of geneseq record W37929 which shows sequence similarity to clone C880P.

[1120] SEQ ID NO:1080 is the amino acid sequence of geneseq record W84274 which shows sequence similarity to clone C880P.

[1121] SEQ ID NO:1081 is the amino acid sequence of geneseq record W740898 which shows sequence similarity to clone C888P.

[1122] SEQ ID NO: 1082 is the determined cDNA sequence for clone 27540 SEQ ID NO:1083 is the predicted amino acid sequence of clone 27540 (SEQ ID NO: 1082).

[1123] SEQ ID NO: 1084 is the determined cDNA sequence for Ral2-C884P-PCRX2.

[1124] SEQ ID NO:1085 the predicted amino acid sequence for Ral2-C884P (SEQ ID NO: 1084).

[1125] SEQ ID NO:1086 the determined cDNA sequence for R.C888P.

[1126] SEQ ID NO:1087 the predicted amino acid sequence for R.C888P (SEQ ID NO: 1086).

[1127] SEQ ID NO:1088 is the PCR primer 080300-A (Primer Identifier 7839) for amplification of C884.

[1128] SEQ ID NO: 1089 is the PCR primer 080300-B (Primer Identifier 7840) for amplification of C884.

[1129] SEQ ID NO: 1090 is the sense PCR Primer-080300-C (Primer ID7841) for amplification of C888P.

[1130] SEQ ID NO:1091 is the antisense PCR Primer-080300-D (Primer ID7842) for amplification of C888P.

[1131] SEQ ID NO: 1092 is the determined cDNA sequence for the RECC gene.

[1132] SEQ ID NO: 1093 is the predicted protein sequence encoded by SEQ ID NO: 1092.

[1133] SEQ ID NO:1094 is the full length C799P/THOX2 cDNA sequence.

[1134] SEQ ID NO: 1095 is the full length C799P/THOX2 amino acid sequence that is the amino acid sequence predicted by the ORF contained in SEQ ID NO: 1094.

[1135] SEQ ID NO: 1096 is the full length cDNA sequence for Galectin-4, which shows similarity to clone CT-53 (C892P).

[1136] SEQ ID NO: 1097 is the full length cDNA sequence for Human SurfaceMarker 1 GPI-anchored, which shows similarity to clone CT-126 (25527).

[1137] SEQ ID NO: 1098 is the full length cDNA sequence for hu.XAG homolog Anterior Gradient Protein, which shows similarity to clone CT-140 (25537).

[1138] SEQ ID NO:1099 is the full length cDNA sequence for hu glucose phosphate isomerase (GPI), which shows similarity to clone CT-148 (25544).

[1139] SEQ ID NO:1100 is the determined cDNA sequence for clone CT2-283 (41103).

[1140] SEQ ID NO:1101 is the full length cDNA sequence for APG-2, which shows similarity to clones CT2-136 (41099) and CT-17 (24115).

[1141] SEQ ID NO: 1102 is the predicted full length protein sequence for APG-2, which shows similarity to clones CT2-136 (41099) and CT-17 (24115).

[1142] SEQ ID NO: 1103 is the full length cDNA sequence for human squalene epoxidase, which shows similarity to clone CS1-104 (31409).

[1143] SEQ ID NO: 1104 is the full length cDNA sequence for human Mad2, which shows similarity to clone CS1-106 (31364).

[1144] SEQ ID NO: 1105 is the full length cDNA sequence for epithelial-specific transcription factor, which shows similarity to clone CS1-123 (31396).

[1145] SEQ ID NO: 1106 is the full length cDNA sequence for KSA, Adenocarcinoma-associated antigen, which shows similarity to clone CS1-160 (32222).

[1146] SEQ ID NO: 1107 is the predicted protein sequence encoded by SEQ ID NO: 1103.

[1147] SEQ ID NO: 1108 is the predicted protein sequence encoded by SEQ ID NO: 1104.

[1148] SEQ ID NO: 1109 is the predicted protein sequence encoded by SEQ ID NO:1105.

[1149] SEQ ID NO: 1110 is the predicted protein sequence encoded by SEQ ID NO: 1106.

[1150] SEQ ID NO:1111 is the full length cDNA sequence for Hu.Keratin19, which shows similarity to clone CT2-167.

[1151] SEQ ID NO: 1112 is the full length cDNA sequence for Hu.IgG Fc-binding protein (FC(GAMMA)BP), which shows similarity to clone CT2-147 (41100).

[1152] SEQ ID NO: 1113 is the full length cDNA sequence for murine Valosin-containing protein, which shows similarity to clone CT2-222 (39848).

[1153] SEQ ID NO: 1114 is the full length cDNA sequence for human Valosin-containing protein, which shows similarity to clone CT2-222 (39848).

[1154] SEQ ID NO: 1115 is the predicted protein sequence encoded by SEQ ID NO: 111.

[1155] SEQ ID NO: 1116 is the predicted protein sequence encoded by SEQ ID NO: 1112.

[1156] SEQ ID NO: 1117 is the predicted protein sequence encoded by SEQ ID NO: 1113.

[1157] SEQ ID NO:1118 is the predicted protein sequence encoded by SEQ ID NO:1114.

[1158] SEQ ID NO:1119 is the determined cDNA sequence for MAPS-C884P.

[1159] SEQ ID NO: 1120 is the determined cDNA sequence C884P-HisTag.

[1160] SEQ ID NO: 1121 is the predicted protein sequence encoded by SEQ ID NO: 1119.

[1161] SEQ ID NO:1122 is the predicted protein sequence encoded by SEQ ID NO:1120.

[1162] SEQ ID NO:1123 is the C884P-HisTag-AW175 sense PCR primer.

[1163] SEQ ID NO:1124 is the C884P-HisTag-AW176 antisense PCR primer.

[1164] SEQ ID NO:1125 is the determined full-length cDNA sequence for CT2-283.

[1165] SEQ ID NO:1126 is the predicted amino acid sequence for ORF1 of CT2-283.

[1166] SEQ ID NO:1127 is the predicted amino acid sequence for ORF2 of CT2-283.

[1167] SEQ ID NO:1128 is the predicted amino acid sequence for ORF3 of CT2-283.

[1168] SEQ ID NO:1129 is the predicted amino acid sequence for ORF4 of CT2-283.

### DETAILED DESCRIPTION OF THE INVENTION

[1169] As noted above, the present invention is generally directed to compositions and methods for the therapy and diagnosis of cancer, such as colon cancer. The compositions described herein may include colon tumor polypeptides, polynucleotides encoding such polypeptides, binding agents such as antibodies, antigen presenting cells (APCs) and/or immune system cells (e.g., T cells). Polypeptides of the present invention generally comprise at least a portion (such as an immunogenic portion) of a colon tumor protein or a variant thereof. A “colon tumor protein” is a protein that is expressed in colon tumor cells at a level that is at least two fold, and preferably at least five fold, greater than the level of expression in a normal tissue, as determined using a representative assay provided herein. Certain colon tumor proteins are tumor proteins that react detectably (within an immunoassay, such as an ELISA or Western blot) with antisera of a patient afflicted with colon cancer. Polynucleotides of the subject invention generally comprise a DNA or RNA sequence that encodes all or a portion of such a polypeptide, or that is complementary to such a sequence. Antibodies are generally immune system proteins, or antigen-binding fragments thereof, that are capable of binding to a polypeptide as described above. Antigen presenting cells include dendritic cells, macrophages, monocytes, fibroblasts and B-cells that express a polypeptide as described above. T cells that may be employed within such compositions are generally T cells that are specific for a polypeptide as described above.

[1170] The present invention is based on the discovery of human colon tumor proteins. Sequences of polynucleotides encoding specific tumor proteins are provided in SEQ ID NO:1-121, 123-197, 205-630, 632-684, 686, 690-691, 694-1058, 1069, 1071-1076, 1082, 1084, 1086, 1092, 1094, 1096-1101, 1103-1106, 1111-1114, 1119, 1120, and 1125.

Colon Tumor Protein Polynucleotides

[1171] Any polynucleotide that encodes a colon tumor protein or a portion or other variant thereof as described herein is encompassed by the present invention. Preferred polynucleotides comprise at least 15 consecutive nucleotides, preferably at least 30 consecutive nucleotides and more preferably at least 45 consecutive nucleotides, that encode a portion of a colon tumor protein. More preferably, a polynucleotide encodes an immunogenic portion of a colon tumor protein. Polynucleotides complementary to any such sequences are also encompassed by the present invention. Polynucleotides may be single-stranded (coding or antisense) or double-stranded, and may be DNA (genomic, cDNA or synthetic) or RNA molecules. RNA molecules include HnRNA molecules, which contain introns and correspond to a DNA molecule in a one-to-one manner, and mRNA molecules, which do not contain introns. Additional coding or non-coding sequences may, but need not, be present within a polynucleotide of the present invention, and a polynucleotide may, but need not, be linked to other molecules and/or support materials.

[1172] Polynucleotides may comprise a native sequence (i.e., an endogenous sequence that encodes a colon tumor protein or a portion thereof) or may comprise a variant of such a sequence. Polynucleotide variants may contain one or more substitutions, additions, deletions and/or insertions such that the immunogenicity of the encoded polypeptide is not diminished, relative to a native tumor protein. The effect on the immunogenicity of the encoded polypeptide may generally be assessed as described herein. Variants preferably exhibit at least about 70% identity, more preferably at least about 80% identity and most preferably at least about 90% identity to a polynucleotide sequence that encodes a native colon tumor protein or a portion thereof.

[1173] Two polynucleotide or polypeptide sequences are said to be “identical” if the sequence of nucleotides or amino acids in the two sequences is the same when aligned for maximum correspondence as described below. Comparisons between two sequences are typically performed by comparing the sequences over a comparison window to identify and compare local regions of sequence similarity. A “comparison window” as used herein, refers to a segment of at least about 20 contiguous positions, usually 30 to about 75, in which a sequence may be compared to a reference sequence of the same number of contiguous positions after the two sequences are optimally aligned.

[1174] Optimal alignment of sequences for comparison may be conducted using the Megalign program in the Lasergene suite of bioinformatics software (DNASTAR, Inc., Madison, Wis.), using default parameters. This program embodies several alignment schemes described in the following references: Dayhoff, M. O. (1978) A model of evolutionary change in proteins—Matrices for detecting distant relationships. In Dayhoff, M. O. (ed.) Atlas of Protein Sequence and Structure, National Biomedical Research Foundation, Washington D.C. Vol. 5, Suppl. 3, pp. 345-358; Hein J. (1990) Unified Approach to Alignment and Phylogenes pp. 626-645 Methods in Enzymology vol. 183, Academic Press, Inc., San Diego, Calif.; Higgins, D. G. and Sharp, P. M. (1989) CABIOS 5:151-153; Myers, E. W. and Muller W. (1988) CABIOS 4:11-17; Robinson, E. D. (1971) Comb. Theor 11:105; Santou, N. Nes, M. (1987) Mol. Biol. Evol. 4:406-425; Sneath, P. H. A. and Sokal, R. R. (1973) Numerical Taxonomy—the Principles and Practice of Numerical Taronomy, Freeman Press, San Francisco, Calif.; Wilbur, W. J. and Lipman, D. J. (1983) Proc. Natl. Acad., Sci. USA 80:726-730.

[1175] Preferably, the “percentage of sequence identity” is determined by comparing two optimally aligned sequences over a window of comparison of at least 20 positions, wherein the portion of the polynucleotide or polypeptide sequence in the comparison window may comprise additions or deletions (i.e. gaps) of 20 percent or less, usually 5 to 15 percent, or 10 to 12 percent, as compared to the reference sequence (which does not comprise additions or deletions) for optimal alignment of the two sequences. The percentage is calculated by determining the number of positions at which the identical nucleic acid bases or amino acid residue occurs in both sequences to yield the number of matched positions, dividing the number of matched positions by the total number of positions in the reference sequence (i.e. the window size) and multiplying the results by 100 to yield the percentage of sequence identity.

[1176] Variants may also, or alternatively, be substantially homologous to a native gene, or a portion or complement thereof. Such polynucleotide variants are capable of hybridizing under moderately stringent conditions to a naturally occurring DNA sequence encoding a native colon tumor protein (or a complementary sequence). Suitable moderately stringent conditions include prewashing in a solution of 5×SSC, 0.5% SDS, 1.0 mM EDTA (pH 8.0); hybridizing at 50° C.-65° C., 5×SSC, overnight; followed by washing twice at 65° C. for 20 minutes with each of 2×, 0.5× and 0.2×SSC containing 0.1% SDS.

[1177] It will be appreciated by those of ordinary skill in the art that, as a result of the degeneracy of the genetic code, there are many nucleotide sequences that encode a polypeptide as described herein. Some of these polynucleotides bear minimal homology to the nucleotide sequence of any native gene. Nonetheless, polynucleotides that vary due to differences in codon usage are specifically contemplated by the present invention. Further, alleles of the genes comprising the polynucleotide sequences provided herein are within the scope of the present invention. Alleles are endogenous genes that are altered as a result of one or more mutations, such as deletions, additions and/or substitutions of nucleotides. The resulting mRNA and protein may, but need not, have an altered structure or function. Alleles may be identified using standard techniques (such as hybridization, amplification and/or database sequence comparison).

[1178] Polynucleotides may be prepared using any of a variety of techniques. For example, a polynucleotide may be identified, as described in more detail below, by screening a microarray of cDNAs for tumor-associated expression (i.e., expression that is at least two fold greater in a colon tumor than in normal tissue, as determined using a representative assay provided herein). Such screens may be performed using a Synteni microarray (Palo Alto, Calif.) according to the manufacturer's instructions (and essentially as described by Schena et al., Proc. Natl. Acad. Sci. USA 93:10614-10619, 1996 and Heller et al., Proc. Natl. Acad. Sci. USA 94:2150-2155, 199,7). Alternatively, polypeptides may be amplified from cDNA prepared from cells expressing the proteins described herein, such as colon tumor cells. Such polynucleotides may be amplified via polymerase chain reaction (PCR). For this approach, sequence-specific primers may be designed based on the sequences provided herein, and may be purchased or synthesized.

[1179] An amplified portion may be used to isolate a full length gene from a suitable library (e.g., a colon tumor cDNA library) using well known techniques. Within such techniques, a library (cDNA or genomic) is screened using one or more polynucleotide probes or primers suitable for amplification. Preferably, a library is size-selected to include larger molecules. Random primed libraries may also be preferred for identifying 5′ and upstream regions of genes. Genomic libraries are preferred for obtaining introns and extending 5′ sequences.

[1180] For hybridization techniques, a partial sequence may be labeled (e.g., by nick-translation or end-labeling with ³²P) using well known techniques. A bacterial or bacteriophage library is then screened by hybridizing filters containing denatured bacterial colonies (or lawns containing phage plaques) with the labeled probe (see Sambrook et al., Molecular Cloning: A Laboratory Manual, Cold Spring Harbor Laboratories, Cold Spring Harbor, N.Y., 1989). Hybridizing colonies or plaques are selected and expanded, and the DNA is isolated for further analysis. cDNA clones may be analyzed to determine the amount of additional sequence by, for example, PCR using a primer from the partial sequence and a primer from the vector. Restriction maps and partial sequences may be generated to identify one or more overlapping clones. The complete sequence may then be determined using standard techniques, which may involve generating a series of deletion clones. The resulting overlapping sequences are then assembled into a single contiguous sequence. A full length cDNA molecule can be generated by ligating suitable fragments, using well known techniques.

[1181] Alternatively, there are numerous amplification techniques for obtaining a full length coding sequence from a partial cDNA sequence. Within such techniques, amplification is generally performed via PCR. Any of a variety of commercially available kits may be used to perform the amplification step. Primers may be designed using, for example, software well known in the art. Primers are preferably 22-30 nucleotides in length, have a GC content of at least 50% and anneal to the target sequence at temperatures of about 68° C. to 72° C. The amplified region may be sequenced as described above, and overlapping sequences assembled into a contiguous sequence.

[1182] One such amplification technique is inverse PCR (see Triglia et al., Nucl. Acids Res. 16:8186, 1988), which uses restriction enzymes to generate a fragment in the known region of the gene. The fragment is then circularized by intramolecular ligation and used as a template for PCR with divergent primers derived from the known region. Within an alternative approach, sequences adjacent to a partial sequence may be retrieved by amplification with a primer to a linker sequence and a primer specific to a known region. The amplified sequences are typically subjected to a second round of amplification with the same linker primer and a second primer specific to the known region. A variation on this procedure, which employs two primers that initiate extension in opposite directions from the known sequence, is described in WO 96/38591. Another such technique is known as “rapid amplification of cDNA ends” or RACE. This technique involves the use of an internal primer and an external primer, which hybridizes to a polyA region or vector sequence, to identify sequences that are 5′ and 3′ of a known sequence. Additional techniques include capture PCR (Lagerstrom et al., PCR Methods Applic. 1:111-19, 1991) and walking PCR (Parker et al., Nucl. Acids Res. 19:3055-60, 1991). Other methods employing amplification may also be employed to obtain a full length cDNA sequence.

[1183] In certain instances, it is possible to obtain a full length cDNA sequence by analysis of sequences provided in an expressed sequence tag (EST) database, such as that available from GenBank. Searches for overlapping ESTs may generally be performed using well known programs (e.g., NCBI BLAST searches), and such ESTs may be used to generate a contiguous full length sequence.

[1184] Certain nucleic acid sequences of cDNA molecules encoding portions of colon tumor proteins are provided in SEQ ID NO: 1-121, 123-197, 205-630, 632-684, 686, 690-691, 694-1058, 1069, 1071-1076, 1082, 1084, 1086, 1092, 1094, 1096-1101, 1103-1106, 1111-1114, 1119, 1120, and 1125. These polynucleotides were isolated from colon tumor cDNA libraries using conventional and/or PCR-based subtraction techniques, as described below.

[1185] Polynucleotide variants may generally be prepared by any method known in the art, including chemical synthesis by, for example, solid phase phosphoramidite chemical synthesis. Modifications in a polynucleotide sequence may also be introduced using standard mutagenesis techniques, such as oligonucleotide-directed site-specific mutagenesis (see Adelman et al., DNA 2:183, 1983). Alternatively, RNA molecules may be generated by in vitro or in vivo transcription of DNA sequences encoding a colon tumor protein, or portion thereof, provided that the DNA is incorporated into a vector with a suitable RNA polymerase promoter (such as T7 or SP6). Certain portions may be used to prepare an encoded polypeptide, as described herein. In addition, or alternatively, a portion may be administered to a patient such that the encoded polypeptide is generated in vivo (e.g., by transfecting antigen-presenting cells, such as dendritic cells, with a cDNA construct encoding a colon tumor polypeptide, and administering the transfected cells to the patient).

[1186] A portion of a sequence complementary to a coding sequence (i.e., an antisense polynucleotide) may also be used as a probe or to modulate gene expression. cDNA constructs that can be transcribed into antisense RNA may also be introduced into cells of tissues to facilitate the production of antisense RNA. An antisense polynucleotide may be used, as described herein, to inhibit expression of a tumor protein. Antisense technology can be used to control gene expression through triple-helix formation, which compromises the ability of the double helix to open sufficiently for the binding of polymerases, transcription factors or regulatory molecules (see Gee et al., In Huber and Carr, Molecular and Immunologic Approaches, Futura Publishing Co. (Mt. Kisco, N.Y.; 1994)). Alternatively, an antisense molecule may be designed to hybridize with a control region of a gene (e.g., promoter, enhancer or transcription initiation site), and block transcription of the gene; or to block translation by inhibiting binding of a transcript to ribosomes.

[1187] A portion of a coding sequence, or of a complementary sequence, may also be designed as a probe or primer to detect gene expression. Probes may be labeled with a variety of reporter groups, such as radionuclides and enzymes, and are preferably at least 10 nucleotides in length, more preferably at least 20 nucleotides in length and still more preferably at least 30 nucleotides in length. Primers, as noted above, are preferably 22-30 nucleotides in length.

[1188] Any polynucleotide may be further modified to increase stability in vivo. Possible modifications include, but are not limited to, the addition of flanking sequences at the 5′ and/or 3′ ends; the use of phosphorothioate or 2′ O-methyl rather than phosphodiesterase linkages in the backbone; and/or the inclusion of nontraditional bases such as inosine, queosine and wybutosine, as well as acetyl-methyl-, thio- and other modified forms of adenine, cytidine, guanine, thymine and uridine.

[1189] Nucleotide sequences as described herein may be joined to a variety of other nucleotide sequences using established recombinant DNA techniques. For example, a polynucleotide may be cloned into any of a variety of cloning vectors, including plasmids, phagemids, lambda phage derivatives and cosmids. Vectors of particular interest include expression vectors, replication vectors, probe generation vectors and sequencing vectors. In general, a vector will contain an origin of replication functional in at least one organism, convenient restriction endonuclease sites and one or more selectable markers. Other elements will depend upon the desired use, and will be apparent to those of ordinary skill in the art.

[1190] Within certain embodiments, polynucleotides may be formulated so as to permit entry into a cell of a mammal, and expression therein. Such formulations are particularly useful for therapeutic purposes, as described below. Those of ordinary skill in the art will appreciate that there are many ways to achieve expression of a polynucleotide in a target cell, and any suitable method may be employed. For example, a polynucleotide may be incorporated into a viral vector such as, but not limited to, adenovirus, adeno-associated virus, retrovirus, or vaccinia or other pox virus (e.g., avian pox virus). Techniques for incorporating DNA into such vectors are well known to those of ordinary skill in the art. A retroviral vector may additionally transfer or incorporate a gene for a selectable marker (to aid in the identification or selection of transduced cells) and/or a targeting moiety, such as a gene that encodes a ligand for a receptor on a specific target cell, to render the vector target specific. Targeting may also be accomplished using an antibody, by methods known to those of ordinary skill in the art.

[1191] Other formulations for therapeutic purposes include colloidal dispersion systems, such as macromolecule complexes, nanocapsules, microspheres, beads, and lipid-based systems including oil-in-water emulsions, micelles, mixed micelles, and liposomes. A preferred colloidal system for use as a delivery vehicle in vitro and in vivo is a liposome (i.e., an artificial membrane vesicle). The preparation and use of such systems is well known in the art.

Colon Tumor Polypeptides

[1192] Within the context of the present invention, polypeptides may comprise at least an immunogenic portion of a colon tumor protein or a variant thereof, as described herein. As noted above, a “colon tumor protein” is a protein that is expressed by colon tumor cells. Proteins that are colon tumor proteins also react detectably within an immunoassay (such as an ELISA) with antisera from a patient with colon cancer. Polypeptides as described herein may be of any length. Additional sequences derived from the native protein and/or heterologous sequences may be present, and such sequences may (but need not) possess further immunogenic or antigenic properties.

[1193] An “immunogenic portion,” as used herein is a portion of a protein that is recognized (i.e., specifically bound) by a B-cell and/or T-cell surface antigen receptor. Such immunogenic portions generally comprise at least 5 amino acid residues, more preferably at least 10, and still more preferably at least 20 amino acid residues of a colon tumor protein or a variant thereof. Certain preferred immunogenic portions include peptides in which an N-terminal leader sequence and/or transmembrane domain have been deleted. Other preferred immunogenic portions may contain a small N- and/or C-terminal deletion (e.g., 1-30 amino acids, preferably 5-15 amino acids), relative to the mature protein.

[1194] Immunogenic portions may generally be identified using well known techniques, such as those summarized in Paul, Fundamental Immunology, 3rd ed., 243-247 (Raven Press, 1993) and references cited therein. Such techniques include screening polypeptides for the ability to react with antigen-specific antibodies, antisera and/or T-cell lines or clones. As used herein, antisera and antibodies are “antigen-specific” if they specifically bind to an antigen (i.e., they react with the protein in an ELISA or other immunoassay, and do not react detectably with unrelated proteins). Such antisera and antibodies may be prepared as described herein, and using well known techniques. An immunogenic portion of a native colon tumor protein is a portion that reacts with such antisera and/or T-cells at a level that is not substantially less than the reactivity of the full length polypeptide (e.g., in an ELISA and/or T-cell reactivity assay). Such immunogenic portions may react within such assays at a level that is similar to or greater than the reactivity of the full length polypeptide. Such screens may generally be performed using methods well known to those of ordinary skill in the art, such as those described in Harlow and Lane, Antibodies: A Laboratory Manual, Cold Spring Harbor Laboratory, 1988. For example, a polypeptide may be immobilized on a solid support and contacted with patient sera to allow binding of antibodies within the sera to the immobilized polypeptide. Unbound sera may then be removed and bound antibodies detected using, for example, 125I-labeled Protein A.

[1195] As noted above, a composition may comprise a variant of a native colon tumor protein. A polypeptide “variant,” as used herein, is a polypeptide that differs from a native colon tumor protein in one or more substitutions, deletions, additions and/or insertions, such that the immunogenicity of the polypeptide is not substantially diminished. In other words, the ability of a variant to react with antigen-specific antisera may be enhanced or unchanged, relative to the native protein, or may be diminished by less than 50%, and preferably less than 20%, relative to the native protein. Such variants may generally be identified by modifying one of the above polypeptide sequences and evaluating the reactivity of the modified polypeptide with antigen-specific antibodies or antisera as described herein. Preferred variants include those in which one or more portions, such as an N-terminal leader sequence or transmembrane domain, have been removed. Other preferred variants include variants in which a small portion (e.g., 1-30 amino acids, preferably 5-15 amino acids) has been removed from the N- and/or C-terminal of the mature protein.

[1196] Polypeptide variants preferably exhibit at least about 70%, more preferably at least about 90% and most preferably at least about 95% identity (determined as described above) to the identified polypeptides.

[1197] Preferably, a variant contains conservative substitutions. A “conservative substitution” is one in which an amino acid is substituted for another amino acid that has similar properties, such that one skilled in the art of peptide chemistry would expect the secondary structure and hydropathic nature of the polypeptide to be substantially unchanged. Amino acid substitutions may generally be made on the basis of similarity in polarity, charge, solubility, hydrophobicity, hydrophilicity and/or the amphipathic nature of the residues. For example, negatively charged amino acids include aspartic acid and glutamic acid; positively charged amino acids include lysine and arginine; and amino acids with uncharged polar head groups having similar hydrophilicity values include leucine, isoleucine and valine; glycine and alanine; asparagine and glutamine; and serine, threonine, phenylalanine and tyrosine. Other groups of amino acids that may represent conservative changes include: (1) ala, pro, gly, glu, asp, gln, asn, ser, thr; (2) cys, ser, tyr, thr; (3) val, ile, leu, met, ala, phe; (4) lys, arg, his; and (5) phe, tyr, trp, his. A variant may also, or alternatively, contain non-conservative changes. In a preferred embodiment, variant polypeptides differ from a native sequence by substitution, deletion or addition of five amino acids or fewer. Variants may also (or alternatively) be modified by, for example, the deletion or addition of amino acids that have minimal influence on the immunogenicity, secondary structure and hydropathic nature of the polypeptide.

[1198] As noted above, polypeptides may comprise a signal (or leader) sequence at the N-terminal end of the protein which co-translationally or post-translationally directs transfer of the protein. The polypeptide may also be conjugated to a linker or other sequence for ease of synthesis, purification or identification of the polypeptide (e.g., poly-His), or to enhance binding of the polypeptide to a solid support. For example, a polypeptide may be conjugated to an immunoglobulin Fc region.

[1199] Polypeptides may be prepared using any of a variety of well known techniques. Recombinant polypeptides encoded by DNA sequences as described above may be readily prepared from the DNA sequences using any of a variety of expression vectors known to those of ordinary skill in the art. Expression may be achieved in any appropriate host cell that has been transformed or transfected with an expression vector containing a DNA molecule that encodes a recombinant polypeptide. Suitable host cells include prokaryotes, yeast and higher eukaryotic cells. Preferably, the host cells employed are E. coli, yeast or a mammalian cell line such as COS or CHO. Supernatants from suitable host/vector systems which secrete recombinant protein or polypeptide into culture media may be first concentrated using a commercially available filter. Following concentration, the concentrate may be applied to a suitable purification matrix such as an affinity matrix or an ion exchange resin. Finally, one or more reverse phase HPLC steps can be employed to further purify a recombinant polypeptide.

[1200] Portions and other variants having fewer than about 100 amino acids, and generally fewer than about 50 amino acids, may also be generated by synthetic means, using techniques well known to those of ordinary skill in the art. For example, such polypeptides may be synthesized using any of the commercially available solid-phase techniques, such as the Merrifield solid-phase synthesis method, where amino acids are sequentially added to a growing amino acid chain. See Merrifield, J. Am. Chem. Soc. 85:2149-2146, 1963. Equipment for automated synthesis of polypeptides is commercially available from suppliers such as Perkin Elmer/Applied BioSystems Division (Foster City, Calif.), and may be operated according to the manufacturer's instructions.

[1201] Within certain specific embodiments, a polypeptide may be a fusion protein that comprises multiple polypeptides as described herein, or that comprises at least one polypeptide as described herein and an unrelated sequence, such as a known tumor protein. A fusion partner may, for example, assist in providing T helper epitopes (an immunological fusion partner), preferably T helper epitopes recognized by humans, or may assist in expressing the protein (an expression enhancer) at higher yields than the native recombinant protein. Certain preferred fusion partners are both immunological and expression enhancing fusion partners. Other fusion partners may be selected so as to increase the solubility of the protein or to enable the protein to be targeted to desired intracellular compartments. Still further fusion partners include affinity tags, which facilitate purification of the protein.

[1202] Fusion proteins may generally be prepared using standard techniques, including chemical conjugation. Preferably, a fusion protein is expressed as a recombinant protein, allowing the production of increased levels, relative to a non-fused protein, in an expression system. Briefly, DNA sequences encoding the polypeptide components may be assembled separately, and ligated into an appropriate expression vector. The 3′ end of the DNA sequence encoding one polypeptide component is ligated, with or without a peptide linker, to the 5′ end of a DNA sequence encoding the second polypeptide component so that the reading frames of the sequences are in phase. This permits translation into a single fusion protein that retains the biological activity of both component polypeptides.

[1203] A peptide linker sequence may be employed to separate the first and the second polypeptide components by a distance sufficient to ensure that each polypeptide folds into its secondary and tertiary structures. Such a peptide linker sequence is incorporated into the fusion protein using standard techniques well known in the art. Suitable peptide linker sequences may be chosen based on the following factors: (1) their ability to adopt a flexible extended conformation; (2) their inability to adopt a secondary structure that could interact with functional epitopes on the first and second polypeptides; and (3) the lack of hydrophobic or charged residues that might react with the polypeptide functional epitopes. Preferred peptide linker sequences contain Gly, Asn and Ser residues. Other near neutral amino acids, such as Thr and Ala may also be used in the linker sequence. Amino acid sequences which may be usefully employed as linkers include those disclosed in Maratea et al., Gene 40:39-46, 1985; Murphy et al., Proc. Natl. Acad. Sci. USA 83:8258-8262, 1986; U.S. Pat. No. 4,935,233 and U.S. Pat. No. 4,751,180. The linker sequence may generally be from 1 to about 50 amino acids in length. Linker sequences are not required when the first and second polypeptides have non-essential N-terminal amino acid regions that can be used to separate the functional domains and prevent steric interference.

[1204] The ligated DNA sequences are operably linked to suitable transcriptional or translational regulatory elements. The regulatory elements responsible for expression of DNA are located only 5′ to the DNA sequence encoding the first polypeptides. Similarly, stop codons required to end translation and transcription termination signals are only present 3′ to the DNA sequence encoding the second polypeptide.

[1205] Fusion proteins are also provided that comprise a polypeptide of the present invention together with an unrelated immunogenic protein. Preferably the immunogenic protein is capable of eliciting a recall response. Examples of such proteins include tetanus, tuberculosis and hepatitis proteins (see, for example, Stoute et al. New Engl. J. Med., 336:86-91, 1997).

[1206] Within preferred embodiments, an immunological fusion partner is derived from protein D, a surface protein of the gram-negative bacterium Haemophilus influenza B (WO 91/18926). Preferably, a protein D derivative comprises approximately the first third of the protein (e.g., the first N-terminal 100-110 amino acids), and a protein D derivative may be lipidated. Within certain preferred embodiments, the first 109 residues of a Lipoprotein D fusion partner is included on the N-terminus to provide the polypeptide with additional exogenous T-cell epitopes and to increase the expression level in E. coli (thus functioning as an expression enhancer). The lipid tail ensures optimal presentation of the antigen to antigen presenting cells. Other fusion partners include the non-structural protein from influenzae virus, NS1 (hemaglutinin). Typically, the N-terminal 81 amino acids are used, although different fragments that include T-helper epitopes may be used.

[1207] In another embodiment, the immunological fusion partner is the protein known as LYTA, or a portion thereof (preferably a C-terminal portion). LYTA is derived from Streptococcus pneumoniae, which synthesizes an N-acetyl-L-alanine amidase known as amidase LYTA (encoded by the LytA gene; Gene 43:265-292, 1986). LYTA is an autolysin that specifically degrades certain bonds in the peptidoglycan backbone. The C-terminal domain of the LYTA protein is responsible for the affinity to the choline or to some choline analogues such as DEAE. This property has been exploited for the development of E. coli C-LYTA expressing plasmids useful for expression of fusion proteins. Purification of hybrid proteins containing the C-LYTA fragment at the amino terminus has been described (see Biotechnology 10:795-798, 1992). Within a preferred embodiment, a repeat portion of LYTA may be incorporated into a fusion protein. A repeat portion is found in the C-terminal region starting at residue 178. A particularly preferred repeat portion incorporates residues 188-305.

[1208] In another embodiment, a Mycobacterium tuberculosis-derived Ra12 polynucleotide is linked to at least an immunogenic portion of a polynucleotide of this invention. Ra12 compositions and methods for their use in enhancing expression of heterologous polynucleotide sequences is described in U.S. patent application Ser. No. 60/158,585, the disclosure of which is incorporated herein by reference in its entirety. Briefly, Ra12 refers to a polynucleotide region that is a subsequence of a Mycobacterium tuberculosis MTB32A nucleic acid. MTB32A is a serine protease of 32 KD molecular weight encoded by a gene in virulent and a virulent strains of M. tuberculosis. The nucleotide sequence and amino acid sequence of MTB32A have been described (for example, U.S. Patent Application 60/158,585; see also, Skeiky et al., Infection and Immun. (1999) 67:3998-4007, incorporated herein by reference). Surprisingly, it was discovered that a 14 KD C-terminal fragment of the MTB32A coding sequence expresses at high levels on its own and remains as a soluble protein throughout the purification process. Moreover, Ra12 may enhance the immunogenicity of heterologous antigenic polypeptides with which it is fused. This 14 KD C-terminal fragment of the MTB32A is referred herein as Ra12 and represents a fragment comprising some or all of amino acid residues 192 to 323 of MTB32A.

[1209] Recombinant nucleic acids, which encode a fusion polypeptide comprising a Ra12 polypeptide and a heterologous colon tumor polypeptide of interest, can be readily constructed by conventional genetic engineering techniques. Recombinant nucleic acids are constructed so that, preferably, a Ra12 polynucleotide sequence is located 5′ to a selected heterologous colon tumor polynucleotide sequence. It may also be appropriate to place a Ra12 polynucleotide sequence 3′ to a selected heterologous polynucleotide sequence or to insert a heterologous polynucleotide sequence into a site within a Ra12 polynucleotide sequence.

[1210] In addition, any suitable polynucleotide that encodes a Ra12 or a portion or other variant thereof can be used in constructing recombinant fusion polynucleotides comprising Ra12 and one or more colon tumor polynucleotides disclosed herein. Preferred Ra12 polynucleotides generally comprise at least about 15 consecutive nucleotides, at least about 30 nucleotides, at least about 60 nucleotides, at least about 100 nucleotides, at least about 200 nucleotides, or at least about 300 nucleotides that encode a portion of a Ra12 polypeptide.

[1211] Ra12 polynucleotides may comprise a native sequence (i.e., an endogenous sequence that encodes a Ra12 polypeptide or a portion thereof) or may comprise a variant of such a sequence. Ra12 polynucleotide variants may contain one or more substitutions, additions, deletions and/or insertions such that the biological activity of the encoded fusion polypeptide is not substantially diminished, relative to a fusion polypeptide comprising a native Ra12 polypeptide. Variants preferably exhibit at least about 70% identity, more preferably at least about 80% identity and most preferably at least about 90% identity to a polynucleotide sequence that encodes a native Ra12 polypeptide or a portion thereof.

[1212] In another embodiment, the immunological fusion partner is the protein known as MAPS (or MAPS-1A antigen), or a portion thereof. MAPS is derived from the bacterium, Leishmania major and is described in U.S. patent application Ser. Nos.: 09/183,861 and 09/874,923, the disclosures of which are incorporated herein by reference in their entirety.

[1213] Recombinant nucleic acids, which encode a fusion polypeptide comprising a MAPS polypeptide and a heterologous colon tumor polypeptide of interest, can be readily constructed by conventional genetic engineering techniques. Recombinant nucleic acids are constructed so that, preferably, a MAPS polynucleotide sequence is located 5′ to a selected heterologous colon tumor polynucleotide sequence. It may also be appropriate to place a MAPS polynucleotide sequence 3′ to a selected heterologous polynucleotide sequence or to insert a heterologous polynucleotide sequence into a site within a MAPS polynucleotide sequence.

[1214] In general, polypeptides (including fusion proteins) and polynucleotides as described herein are isolated. An “isolated” polypeptide or polynucleotide is one that is removed from its original environment. For example, a naturally-occurring protein is isolated if it is separated from some or all of the coexisting materials in the natural system. Preferably, such polypeptides are at least about 90% pure, more preferably at least about 95% pure and most preferably at least about 99% pure. A polynucleotide is considered to be isolated if, for example, it is cloned into a vector that is not a part of the natural environment.

Binding Agents

[1215] The present invention further provides agents, such as antibodies and antigen-binding fragments thereof, that specifically bind to a colon tumor protein. As used herein, an antibody, or antigen-binding fragment thereof, is said to “specifically bind” to a colon tumor protein if it reacts at a detectable level (within, for example, an ELISA) with a colon tumor protein, and does not react detectably with unrelated proteins under similar conditions. As used herein, “binding” refers to a noncovalent association between two separate molecules such that a complex is formed. The ability to bind may be evaluated by, for example, determining a binding constant for the formation of the complex. The binding constant is the value obtained when the concentration of the complex is divided by the product of the component concentrations. In general, two compounds are said to “bind,” in the context of the present invention, when the binding constant for complex formation exceeds about 10³ L/mol. The binding constant may be determined using methods well known in the art.

[1216] Binding agents may be further capable of differentiating between patients with and without a cancer, such as colon cancer, using the representative assays provided herein. In other words, antibodies or other binding agents that bind to a colon tumor protein will generate a signal indicating the presence of a cancer in at least about 20% of patients with the disease, and will generate a negative signal indicating the absence of the disease in at least about 90% of individuals without the cancer. To determine whether a binding agent satisfies this requirement, biological samples (e.g., blood, sera, sputum, urine and/or tumor biopsies) from patients with and without a cancer (as determined using standard clinical tests) may be assayed as described herein for the presence of polypeptides that bind to the binding agent. It will be apparent that a statistically significant number of samples with and without the disease should be assayed. Each binding agent should satisfy the above criteria; however, those of ordinary skill in the art will recognize that binding agents may be used in combination to improve sensitivity.

[1217] Any agent that satisfies the above requirements may be a binding agent. For example, a binding agent may be a ribosome, with or without a peptide component, an RNA molecule or a polypeptide. In a preferred embodiment, a binding agent is an antibody or an antigen-binding fragment thereof. Antibodies may be prepared by any of a variety of techniques known to those of ordinary skill in the art. See, e.g., Harlow and Lane, Antibodies: A Laboratory Manual, Cold Spring Harbor Laboratory, 1988. In general, antibodies can be produced by cell culture techniques, including the generation of monoclonal antibodies as described herein, or via transfection of antibody genes into suitable bacterial or mammalian cell hosts, in order to allow for the production of recombinant antibodies. In one technique, an immunogen comprising the polypeptide is initially injected into any of a wide variety of mammals (e.g., mice, rats, rabbits, sheep or goats). In this step, the polypeptides of this invention may serve as the immunogen without modification. Alternatively, particularly for relatively short polypeptides, a superior immune response may be elicited if the polypeptide is joined to a carrier protein, such as bovine serum albumin or keyhole limpet hemocyanin. The immunogen is injected into the animal host, preferably according to a predetermined schedule incorporating one or more booster immunizations, and the animals are bled periodically. Polyclonal antibodies specific for the polypeptide may then be purified from such antisera by, for example, affinity chromatography using the polypeptide coupled to a suitable solid support.

[1218] Monoclonal antibodies specific for an antigenic polypeptide of interest may be prepared, for example, using the technique of Kohler and Milstein, Eur. J. Immunol. 6:511-519, 1976, and improvements thereto. Briefly, these methods involve the preparation of immortal cell lines capable of producing antibodies having the desired specificity (i.e., reactivity with the polypeptide of interest). Such cell lines may be produced, for example, from spleen cells obtained from an animal immunized as described above. The spleen cells are then immortalized by, for example, fusion with a myeloma cell fusion partner, preferably one that is syngeneic with the immunized animal. A variety of fusion techniques may be employed. For example, the spleen cells and myeloma cells may be combined with a nonionic detergent for a few minutes and then plated at low density on a selective medium that supports the growth of hybrid cells, but not myeloma cells. A preferred selection technique uses HAT (hypoxanthine, aminopterin, thymidine) selection. After a sufficient time, usually about 1 to 2 weeks, colonies of hybrids are observed. Single colonies are selected and their culture supernatants tested for binding activity against the polypeptide. Hybridomas having high reactivity and specificity are preferred.

[1219] Monoclonal antibodies may be isolated from the supernatants of growing hybridoma colonies. In addition, various techniques may be employed to enhance the yield, such as injection of the hybridoma cell line into the peritoneal cavity of a suitable vertebrate host, such as a mouse. Monoclonal antibodies may then be harvested from the ascites fluid or the blood. Contaminants may be removed from the antibodies by conventional techniques, such as chromatography, gel filtration, precipitation, and extraction. The polypeptides of this invention may be used in the purification process in, for example, an affinity chromatography step.

[1220] Within certain embodiments, the use of antigen-binding fragments of antibodies may be preferred. Such fragments include Fab fragments, which may be prepared using standard techniques. Briefly, immunoglobulins may be purified from rabbit serum by affinity chromatography on Protein A bead columns (Harlow and Lane, Antibodies: A Laboratory Manual, Cold Spring Harbor Laboratory, 1988) and digested by papain to yield Fab and Fc fragments. The Fab and Fc fragments may be separated by affinity chromatography on protein A bead columns.

[1221] Monoclonal antibodies of the present invention may be coupled to one or more therapeutic agents. Suitable agents in this regard include radionuclides, differentiation inducers, drugs, toxins, and derivatives thereof. Preferred radionuclides include ⁹⁰Y, ¹²³I, ¹²⁵I, ¹³¹I, ¹⁸⁶Re, ¹⁸⁶Re, ¹⁸⁸Re, ²¹¹At, and ²¹²Bi. Preferred drugs include methotrexate, and pyrimidine and purine analogs. Preferred differentiation inducers include phorbol esters and butyric acid. Preferred toxins include ricin, abrin, diptheria toxin, cholera toxin, gelonin, Pseudomonas exotoxin, Shigella toxin, and pokeweed antiviral protein.

[1222] A therapeutic agent may be coupled (e.g., covalently bonded) to a suitable monoclonal antibody either directly or indirectly (e.g., via a linker group). A direct reaction between an agent and an antibody is possible when each possesses a substituent capable of reacting with the other. For example, a nucleophilic group, such as an amino or sulfhydryl group, on one may be capable of reacting with a carbonyl-containing group, such as an anhydride or an acid halide, or with an alkyl group containing a good leaving group (e.g., a halide) on the other.

[1223] Alternatively, it may be desirable to couple a therapeutic agent and an antibody via a linker group. A linker group can function as a spacer to distance an antibody from an agent in order to avoid interference with binding capabilities. A linker group can also serve to increase the chemical reactivity of a substituent on an agent or an antibody, and thus increase the coupling efficiency. An increase in chemical reactivity may also facilitate the use of agents, or functional groups on agents, which otherwise would not be possible.

[1224] It will be evident to those skilled in the art that a variety of bifunctional or polyfunctional reagents, both homo- and hetero-functional (such as those described in the catalog of the Pierce Chemical Co., Rockford, Ill.), may be employed as the linker group. Coupling may be effected, for example, through amino groups, carboxyl groups, sulfhydryl groups or oxidized carbohydrate residues. There are numerous references describing such methodology, e.g., U.S. Pat. No. 4,671,958, to Rodwell et al.

[1225] Where a therapeutic agent is more potent when free from the antibody portion of the immunoconjugates of the present invention, it may be desirable to use a linker group which is cleavable during or upon internalization into a cell. A number of different cleavable linker groups have been described. The mechanisms for the intracellular release of an agent from these linker groups include cleavage by reduction of a disulfide bond (e.g., U.S. Pat. No. 4,489,710, to Spitler), by irradiation of a photolabile bond (e.g., U.S. Pat. No. 4,625,014, to Senter et al.), by hydrolysis of derivatized amino acid side chains (e.g., U.S. Pat. No. 4,638,045, to Kohn et al.), by serum complement-mediated hydrolysis (e.g., U.S. Pat. No. 4,671,958, to Rodwell et al.), and acid-catalyzed hydrolysis (e.g., U.S. Pat. No. 4,569,789, to Blattler et al.).

[1226] It may be desirable to couple more than one agent to an antibody. In one embodiment, multiple molecules of an agent are coupled to one antibody molecule. In another embodiment, more than one type of agent may be coupled to one antibody. Regardless of the particular embodiment, immunoconjugates with more than one agent may be prepared in a variety of ways. For example, more than one agent may be coupled directly to an antibody molecule, or linkers which provide multiple sites for attachment can be used. Alternatively, a carrier can be used.

[1227] A carrier may bear the agents in a variety of ways, including covalent bonding either directly or via a linker group. Suitable carriers include proteins such as albumins (e.g., U.S. Pat. No. 4,507,234, to Kato et al.), peptides and polysaccharides such as aminodextran (e.g., U.S. Pat. No. 4,699,784, to Shih et al.). A carrier may also bear an agent by noncovalent bonding or by encapsulation, such as within a liposome vesicle (e.g., U.S. Pat. Nos. 4,429,008 and 4,873,088). Carriers specific for radionuclide agents include radiohalogenated small molecules and chelating compounds. For example, U.S. Pat. No. 4,735,792 discloses representative radiohalogenated small molecules and their synthesis. A radionuclide chelate may be formed from chelating compounds that include those containing nitrogen and sulfur atoms as the donor atoms for binding the metal, or metal oxide, radionuclide. For example, U.S. Pat. No. 4,673,562, to Davison et al. discloses representative chelating compounds and their synthesis.

[1228] A variety of routes of administration for the antibodies and immunoconjugates may be used. Typically, administration will be intravenous, intramuscular, subcutaneous or in the bed of a resected tumor. It will be evident that the precise dose of the antibody/immunoconjugate will vary depending upon the antibody used, the antigen density on the tumor, and the rate of clearance of the antibody.

T Cells

[1229] Immunotherapeutic compositions may also, or alternatively, comprise T cells specific for a colon tumor protein. Such cells may generally be prepared in vitro or ex vivo, using standard procedures. For example, T cells may be isolated from bone marrow, peripheral blood, or a fraction of bone marrow or peripheral blood of a patient, using a commercially available cell separation system, such as the ISOLEX™ system, available from Nexell Therapeutics Inc., Irvine, Calif. Alternatively, T cells may be derived from related or unrelated humans, non-human mammals, cell lines or cultures.

[1230] T cells may be stimulated with a colon tumor polypeptide, polynucleotide encoding a colon tumor polypeptide and/or an antigen presenting cell (APC) that expresses such a polypeptide. Such stimulation is performed under conditions and for a time sufficient to permit the generation of T cells that are specific for the polypeptide. Preferably, a colon tumor polypeptide or polynucleotide is present within a delivery vehicle, such as a microsphere, to facilitate the generation of specific T cells.

[1231] T cells are considered to be specific for a colon tumor polypeptide if the T cells kill target cells coated with the polypeptide or expressing a gene encoding the polypeptide. T cell specificity may be evaluated using any of a variety of standard techniques. For example, within a chromium release assay or proliferation assay, a stimulation index of more than two fold increase in lysis and/or proliferation, compared to negative controls, indicates T cell specificity. Such assays may be performed, for example, as described in Chen et al., Cancer Res. 54:1065-1070, 1994. Alternatively, detection of the proliferation of T cells may be accomplished by a variety of known techniques. For example, T cell proliferation can be detected by measuring an increased rate of DNA synthesis (e.g., by pulse-labeling cultures of T cells with tritiated thymidine and measuring the amount of tritiated thymidine incorporated into DNA). Contact with a colon tumor polypeptide (100 ng/ml-100 μg/ml, preferably 200 ng/ml-25 μg/ml) for 3-7 days should result in at least a two fold increase in proliferation of the T cells. Contact as described above for 2-3 hours should result in activation of the T cells, as measured using standard cytokine assays in which a two fold increase in the level of cytokine release (e.g., TNF or IFN-γ) is indicative of T cell activation (see Coligan et al., Current Protocols in Immunology, vol. 1, Wiley Interscience (Greene 1998)). T cells that have been activated in response to a colon tumor polypeptide, polynucleotide or polypeptide-expressing APC may be CD4⁺ and/or CD8⁺. Colon tumor protein-specific T cells may be expanded using standard techniques. Within preferred embodiments, the T cells are derived from either a patient or a related, or unrelated, donor and are administered to the patient following stimulation and expansion.

[1232] For therapeutic purposes, CD4⁺ or CD8⁺ T cells that proliferate in response to a colon tumor polypeptide, polynucleotide or APC can be expanded in number either in vitro or in vivo. Proliferation of such T cells in vitro may be accomplished in a variety of ways. For example, the T cells can be re-exposed to a colon tumor polypeptide, or a short peptide corresponding to an immunogenic portion of such a polypeptide, with or without the addition of T cell growth factors, such as interleukin-2, and/or stimulator cells that synthesize a colon tumor polypeptide. Alternatively, one or more T cells that proliferate in the presence of a colon tumor protein can be expanded in number by cloning. Methods for cloning cells are well known in the art, and include limiting dilution.

Pharmaceutical Compositions and Vaccines

[1233] Within certain aspects, polypeptides, polynucleotides, T cells and/or binding agents disclosed herein may be incorporated into pharmaceutical compositions or immunogenic compositions (i.e., vaccines). Pharmaceutical compositions comprise one or more such compounds and a physiologically acceptable carrier. Vaccines may comprise one or more such compounds and an immunostimulant. An immunostimulant may be any substance that enhances or potentiates an immune response to an exogenous antigen. Examples of immunostimulants include adjuvants, biodegradable microspheres (e.g., polylactic galactide) and liposomes (into which the compound is incorporated; see e.g., Fullerton, U.S. Pat. No. 4,235,877). Vaccine preparation is generally described in, for example, M. F. Powell and M. J. Newman, eds., “Vaccine Design (the subunit and adjuvant approach),” Plenum Press (NY, 1995). Pharmaceutical compositions and vaccines within the scope of the present invention may also contain other compounds, which may be biologically active or inactive. For example, one or more immunogenic portions of other tumor antigens may be present, either incorporated into a fusion polypeptide or as a separate compound, within the composition or vaccine.

[1234] A pharmaceutical composition or vaccine may contain DNA encoding one or more of the polypeptides as described above, such that the polypeptide is generated in situ. As noted above, the DNA may be present within any of a variety of delivery systems known to those of ordinary skill in the art, including nucleic acid expression systems, bacteria and viral expression systems. Numerous gene delivery techniques are well known in the art, such as those described by Rolland, Crit. Rev. Therap. Drug Carrier Systems 15:143-198, 1998, and references cited therein. Appropriate nucleic acid expression systems contain the necessary DNA sequences for expression in the patient (such as a suitable promoter and terminating signal). Bacterial delivery systems involve the administration of a bacterium (such as Bacillus-Calmette-Guerrin) that expresses an immunogenic portion of the polypeptide on its cell surface or secretes such an epitope. In a preferred embodiment, the DNA may be introduced using a viral expression system (e.g., vaccinia or other pox virus, retrovirus, or adenovirus), which may involve the use of a non-pathogenic (defective), replication competent virus. Suitable systems are disclosed, for example, in Fisher-Hoch et al., Proc. Natl. Acad. Sci. USA 86:317-321, 1989; Flexner et al., Ann. N.Y. Acad. Sci. 569:86-103, 1989; Flexner et al., Vaccine 8:17-21, 1990; U.S. Pat. Nos. 4,603,112, 4,769,330, and 5,017,487; WO 89/01973; U.S. Pat. No. 4,777,127; GB 2,200,651; EP 0,345,242; WO 91/02805; Berkner, Biotechniques 6:616-627, 1988; Rosenfeld et al., Science 252:431-434, 1991; Kolls et al., Proc. Natl. Acad. Sci. USA 91:215-219, 1994; Kass-Eisler et al., Proc. Natl. Acad. Sci. USA 90:11498-11502, 1993; Guzman et al., Circulation 88:2838-2848, 1993; and Guzman et al., Cir. Res. 73:1202-1207, 1993. Techniques for incorporating DNA into such expression systems are well known to those of ordinary skill in the art. The DNA may also be “naked,” as described, for example, in Ulmer et al., Science 259:1745-1749, 1993 and reviewed by Cohen, Science 259:1691-1692, 1993. The uptake of naked DNA may be increased by coating the DNA onto biodegradable beads, which are efficiently transported into the cells.

[1235] While any suitable carrier known to those of ordinary skill in the art may be employed in the pharmaceutical compositions of this invention, the type of carrier will vary depending on the mode of administration. Compositions of the present invention may be formulated for any appropriate manner of administration, including for example, topical, oral, nasal, intravenous, intracranial, intraperitoneal, subcutaneous or intramuscular administration. For parenteral administration, such as subcutaneous injection, the carrier preferably comprises water, saline, alcohol, a fat, a wax or a buffer. For oral administration, any of the above carriers or a solid carrier, such as mannitol, lactose, starch, magnesium stearate, sodium saccharine, talcum, cellulose, glucose, sucrose, and magnesium carbonate, may be employed. Biodegradable microspheres (e.g., polylactate polyglycolate) may also be employed as carriers for the pharmaceutical compositions of this invention. Suitable biodegradable microspheres are disclosed, for example, in U.S. Pat. Nos. 4,897,268 and 5,075,109.

[1236] Such compositions may also comprise buffers (e.g., neutral buffered saline or phosphate buffered saline), carbohydrates (e.g., glucose, mannose, sucrose or dextrans), mannitol, proteins, polypeptides or amino acids such as glycine, antioxidants, chelating agents such as EDTA or glutathione, adjuvants (e.g., aluminum hydroxide) and/or preservatives. Alternatively, compositions of the present invention may be formulated as a lyophilizate. Compounds may also be encapsulated within liposomes using well known technology.

[1237] Any of a variety of immunostimulants may be employed in the vaccines of this invention. For example, an adjuvant may be included. Most adjuvants contain a substance designed to protect the antigen from rapid catabolism, such as aluminum hydroxide or mineral oil, and a stimulator of immune responses, such as lipid A, Bortadella pertussis or Mycobacterium tuberculosis derived proteins. Suitable adjuvants are commercially available as, for example, Freund's Incomplete Adjuvant and Complete Adjuvant (Difco Laboratories, Detroit, Mich.); Merck Adjuvant 65 (Merck and Company, Inc., Rahway, N.J.); AS-2 (SmithKline Beecham, Philadelphia, Pa.); aluminum salts such as aluminum hydroxide gel (alum) or aluminum phosphate; salts of calcium, iron or zinc; an insoluble suspension of acylated tyrosine; acylated sugars; cationically or anionically derivatized polysaccharides; polyphosphazenes; biodegradable microspheres; monophosphoryl lipid A and quil A. Cytokines, such as GM-CSF or interleukin-2, -7, or -12, may also be used as adjuvants.

[1238] Within the vaccines provided herein, the adjuvant composition is preferably designed to induce an immune response predominantly of the Th1 type. High levels of Th1-type cytokines (e.g., IFN-γ, TNFα, IL-2 and IL-12) tend to favor the induction of cell mediated immune responses to an administered antigen. In contrast, high levels of Th2-type cytokines (e.g., IL-4, IL-5, IL-6 and IL-10) tend to favor the induction of humoral immune responses. Following application of a vaccine as provided herein, a patient will support an immune response that includes Th1- and Th2-type responses. Within a preferred embodiment, in which a response is predominantly Th1-type, the level of Th1-type cytokines will increase to a greater extent than the level of Th2-type cytokines. The levels of these cytokines may be readily assessed using standard assays. For a review of the families of cytokines, see Mosmann and Coffman, Ann. Rev. Immunol. 7:145-173, 1989.

[1239] Preferred adjuvants for use in eliciting a predominantly Th1-type response include, for example, a combination of monophosphoryl lipid A, preferably 3-de-O-acylated monophosphoryl lipid A (3D-MPL), together with an aluminum salt. MPL adjuvants are available from Corixa Corp. (Seattle, Wash.) (see U.S. Pat. Nos. 4,436,727; 4,877,611; 4,866,034 and 4,912,094). CpG-containing oligonucleotides (in which the CpG dinucleotide is unmethylated) also induce a predominantly Th1 response. Such oligonucleotides are well known and are described, for example, in WO 96/02555 and WO 99/33488. Immunostimulatory DNA sequences are also described, for example, by Sato et al., Science 273:352, -1996. Another preferred adjuvant is a saponin, preferably QS21 (Aquila Biopharmaceuticals Inc., Framingham, Mass.), which may be used alone or in combination with other adjuvants. For example, an enhanced system involves the combination of a monophosphoryl lipid A and saponin derivative, such as the combination of QS21 and 3D-MPL as described in WO 94/00153, or a less reactogenic composition where the QS21 is quenched with cholesterol, as described in WO 96/33739. Other preferred formulations comprises an oil-in-water emulsion and tocopherol. A particularly potent adjuvant formulation involving QS21, 3D-MPL and tocopherol in an oil-in-water emulsion is described in WO 95/17210.

[1240] Other preferred adjuvants include Montanide ISA 720 (Seppic, France), SAF (Chiron, Calif., United States), ISCOMS (CSL), MF-59 (Chiron), the SBAS series of adjuvants (e.g., SBAS-2 or SBAS-4, available from SmithKline Beecham, Rixensart, Belgium), Detox (Ribi ImmunoChem Research Inc., Hamilton, Mont.), RC-529 (Corixa, Seattle, Wash.) and Aminoalkyl glucosaminide 4-phosphates (AGPs).

[1241] Any vaccine provided herein may be prepared using well known methods that result in a combination of antigen, immune response enhancer and a suitable carrier or excipient. The compositions described herein may be administered as part of a sustained release formulation (i.e., a formulation such as a capsule, sponge or gel (composed of polysaccharides, for example) that effects a slow release of compound following administration). Such formulations may generally be prepared using well known technology (see, e.g. Coombes et al., Vaccine 14:1429-1438, 1996) and administered by, for example, oral, rectal or subcutaneous implantation, or by implantation at the desired target site. Sustained-release formulations may contain a polypeptide, polynucleotide or antibody dispersed in a carrier matrix and/or contained within a reservoir surrounded by a rate controlling membrane.

[1242] Carriers for use within such formulations are biocompatible, and may also be biodegradable; preferably the formulation provides a relatively constant level of active component release. Such carriers include microparticles of poly(lactide-co-glycolide), as well as polyacrylate, latex, starch, cellulose and dextran. Other delayed-release carriers include supramolecular biovectors, which comprise a non-liquid hydrophilic core (e.g., a cross-linked polysaccharide or oligosaccharide) and, optionally, an external layer comprising an amphiphilic compound, such as a phospholipid (see e.g., U.S. Pat. No. 5,151,254 and PCT applications WO 94/20078, WO/94/23701 and WO 96/06638). The amount of active compound contained within a sustained release formulation depends upon the site of implantation, the rate and expected duration of release and the nature of the condition to be treated or prevented.

[1243] Any of a variety of delivery vehicles may be employed within pharmaceutical compositions and vaccines to facilitate production of an antigen-specific immune response that targets tumor cells. Delivery vehicles include antigen presenting cells (APCs), such as dendritic cells, macrophages, B cells, monocytes and other cells that may be engineered to be efficient APCs. Such cells may, but need not, be genetically modified to increase the capacity for presenting the antigen, to improve activation and/or maintenance of the T cell response, to have anti-tumor effects per se and/or to be immunologically compatible with the receiver (i.e., matched HLA haplotype). APCs may generally be isolated from any of a variety of biological fluids and organs, including tumor and peritumoral tissues, and may be autologous, allogeneic, syngeneic or xenogeneic cells.

[1244] Certain preferred embodiments of the present invention use dendritic cells or progenitors thereof as antigen-presenting cells. Dendritic cells are highly potent APCs (Banchereau and Steinman, Nature 392:245-251, 1998) and have been shown to be effective as a physiological adjuvant for eliciting prophylactic or therapeutic antitumor immunity (see Timmerman and Levy, Ann. Rev. Med. 50:507-529, 1999). In general, dendritic cells may be identified based on their typical shape (stellate in siti, with marked cytoplasmic processes (dendrites) visible in vitro), their ability to take up, process and present antigens with high efficiency, and their ability to activate naïve T cell responses. Dendritic cells may, of course, be engineered to express specific cell-surface receptors or ligands that are riot commonly found on dendritic cells in vivo or ex vivo, and such modified dendritic cells are contemplated by the present invention. As an alternative to dendritic cells, secreted vesicles antigen-loaded dendritic cells (called exosomes) may be used within a vaccine (see Zitvogel et al., Nature Med. 4:594-600, 1998).

[1245] Dendritic cells and progenitors may be obtained from peripheral blood, bone marrow, tumor-infiltrating cells, peritumoral tissues-infiltrating cells, lymph nodes, spleen, skin, umbilical cord blood or any other suitable tissue or fluid. For example, dendritic cells may be differentiated ex vivo by adding a combination of cytokines such as GM-CSF, IL-4, IL-13 and/or TNFα to cultures of monocytes harvested from peripheral blood. Alternatively, CD34 positive cells harvested from peripheral blood, umbilical cord blood or bone marrow may be differentiated into dendritic cells by adding to the culture medium combinations of GM-CSF, IL-3, TNFα, CD40 ligand, LPS, flt3 ligand and/or other compound(s) that induce differentiation, maturation and proliferation of dendritic cells.

[1246] Dendritic cells are conveniently categorized as “immature” and “mature” cells, which allows a simple way to discriminate between two well characterized phenotypes. However, this nomenclature should not be construed to exclude all possible intermediate stages of differentiation. Immature dendritic cells are characterized as APC with a high capacity for antigen uptake and processing, which correlates with the high expression of Fcγ receptor and mannose receptor. The mature phenotype is typically characterized by a lower expression of these markers, but a high expression of cell surface molecules responsible for T cell activation such as class I and class II MHC, adhesion molecules (e.g., CD54 and CD11) and costimulatory molecules (e.g., CD40, CD80, CD86 and 4-1BB).

[1247] APCs may generally be transfected with a polynucleotide encoding a colon tumor protein (or portion or other variant thereof) such that the colon tumor polypeptide, or an immunogenic portion thereof, is expressed on the cell surface. Such transfection may take place ex vivo, and a composition or vaccine comprising such transfected cells may then be used for therapeutic purposes, as described herein. Alternatively, a gene delivery vehicle that targets a dendritic or other antigen presenting cell may be administered to a patient, resulting in transfection that occurs in vivo. In vivo and ex vivo transfection of dendritic cells, for example, may generally be performed using any methods known in the art, such as those described in WO 97/24447, or the gene gun approach described by Mahvi et al., Immunology and cell Biology 75:456-460, 1997. Antigen loading of dendritic cells may be achieved by incubating dendritic cells or progenitor cells with the colon tumor polypeptide, DNA (naked or within a plasmid vector) or RNA; or with antigen-expressing recombinant bacterium or viruses (e.g., vaccinia, fowlpox, adenovirus or lentivirus vectors). Prior to loading, the polypeptide may be covalently conjugated to an immunological partner that provides T cell help (e.g., a carrier molecule). Alternatively, a dendritic cell may be pulsed with a non-conjugated immunological partner, separately or in the presence of the polypeptide.

[1248] Vaccines and pharmaceutical compositions may be presented in unit-dose or multi-dose containers, such as sealed ampoules or vials. Such containers are preferably hermetically sealed to preserve sterility of the formulation until use. In general, formulations may be stored as suspensioris, solutions or emulsions in oily or aqueous vehicles. Alternatively, a vaccine or pharmaceutical composition may be stored in a freeze-dried condition requiring only the addition of a sterile liquid carrier immediately prior to use.

Cancer Therapy

[1249] In further aspects of the present invention, the compositions described herein may be used for immunotherapy of cancer, such as colon cancer. Within such methods, pharmaceutical compositions and vaccines are typically administered to a patient. As used herein, a “patient” refers to any warm-blooded animal, preferably a human. A patient may or may not be afflicted with cancer. Accordingly, the above pharmaceutical compositions and vaccines may be used to prevent the development of a cancer or to treat a patient afflicted with a cancer. A cancer may be diagnosed using criteria generally accepted in the art, including the presence of a malignant tumor. Pharmaceutical compositions and vaccines may be administered either prior to or following surgical removal of primary tumors and/or treatment such as administration of radiotherapy or conventional chemotherapeutic drugs.

[1250] Within certain embodiments, immunotherapy may be active immunotherapy, in which treatment relies on the in vivo stimulation of the endogenous host immune system to react against tumors with the administration of immune response-modifying agents (such as polypeptides and polynucleotides disclosed herein).

[1251] Within other embodiments, immunotherapy may be passive immunotherapy, in which treatment involves the delivery of agents with established tumor-immune reactivity (such as effector cells or antibodies) that can directly or indirectly mediate antitumor effects and does not necessarily depend on an intact host immune system. Examples of effector cells include T cells as discussed above, T lymphocytes (such as CD8⁺ cytotoxic T lymphocytes and CD4⁺ T-helper tumor-infiltrating lymphocytes), killer cells (such as Natural Killer cells and lymphokine-activated killer cells), B cells and antigen-presenting cells (such as dendritic cells and macrophages) expressing a polypeptide provided herein. T cell receptors and antibody receptors specific for the polypeptides recited herein may be cloned, expressed and transferred into other vectors or effector cells for adoptive immunotherapy. The polypeptides provided herein may also be used to generate antibodies or anti-idiotypic antibodies (as described above and in U.S. Pat. No. 4,918,164) for passive immunotherapy.

[1252] Effector cells may generally be obtained in sufficient quantities for adoptive immunotherapy by growth in vitro, as described herein. Culture conditions for expanding single antigen-specific effector cells to several billion in number with retention of antigen recognition in vivo are well known in the art. Such in vitro culture conditions typically use intermittent stimulation with antigen, often in the presence of cytokines (such as IL-2) and non-dividing feeder cells. As noted above, immunoreactive polypeptides as provided herein may be used to rapidly expand antigen-specific T cell cultures in order to generate a sufficient number of cells for immunotherapy. In particular, antigen-presenting cells, such as dendritic, macrophage, monocyte, fibroblast and/or B cells, may be pulsed with immunoreactive polypeptides or transfected with one or more polynucleotides using standard techniques well known in the art. For example, antigen-presenting cells can be transfected with a polynucleotide having a promoter appropriate for increasing expression in a recombinant virus or other expression system. Cultured effector cells for use in therapy must be able to grow and distribute widely, and to survive long term in vivo. Studies have shown that cultured effector cells can be induced to grow in vivo and to survive long term in substantial numbers by repeated stimulation with antigen supplemented with IL-2 (see, for example, Cheever et al., Immunological Reviews 157:177, 1997).

[1253] Alternatively, a vector expressing a polypeptide recited herein may be introduced into antigen presenting cells taken from a patient and clonally propagated ex vivo for transplant back into the same patient. Transfected cells may be reintroduced into the patient using any means known in the art, preferably in sterile form by intravenous, intracavitary, intraperitoneal or intratumor administration.

[1254] Routes and frequency of administration of the therapeutic compositions disclosed herein, as well as dosage, will vary from individual to individual, and may be readily established using standard techniques. In general, the pharmaceutical compositions and vaccines may be administered by injection (e.g., intracutaneous, intramuscular, intravenous or subcutaneous), intranasally (e.g., by aspiration) or orally. Preferably, between 1 and 10 doses may be administered over a 52 week period. Preferably, 6 doses are administered, at intervals of 1 month, and booster vaccinations may be given periodically thereafter. Alternate protocols may be appropriate for individual patients. A suitable dose is an amount of a compound that, when administered as described above, is capable of promoting an anti-tumor immune response, and is at least 10-50% above the basal (i.e., untreated) level. Such response can be monitored by measuring the anti-tumor antibodies in a patient or by vaccine-dependent generation of cytolytic effector cells capable of killing the patient's tumor cells in vitro. Such vaccines should also be capable of causing an immune response that leads to an improved clinical outcome (e.g., more frequent remissions, complete or partial or longer disease-free survival) in vaccinated patients as compared to non-vaccinated patients. In general, for pharmaceutical compositions and vaccines comprising one or more polypeptides, the amount of each polypeptide present in a dose ranges from about 25 μg to 5 mg per kg of host. Suitable dose sizes will vary with the size of the patient, but will typically range from about 0.1 mL to about 5 mL.

[1255] In general, an appropriate dosage and treatment regimen provides the active compound(s) in an amount sufficient to provide therapeutic and/or prophylactic benefit. Such a response can be monitored by establishing an improved clinical outcome (e.g., more frequent remissions, complete or partial, or longer disease-free survival) in treated patients as compared to non-treated patients. Increases in preexisting immune responses to a colon tumor protein generally correlate with an improved clinical outcome. Such immune responses may generally be evaluated using standard proliferation, cytotoxicity or cytokine assays, which may be performed using samples obtained from a patient before and after treatment.

Methods for Detecting Cancer

[1256] In general, a cancer may be detected in a patient based on the presence of one or more colon tumor proteins and/or polynucleotides encoding such proteins in a biological sample (for example, blood, sera, sputum, urine and/or tumor biopsies) obtained from the patient. In other words, such proteins may be used as markers to indicate the presence or absence of a cancer such as colon cancer. In addition, such proteins may be useful for the detection of other cancers. The binding agents provided herein generally permit detection of the level of antigen that binds to the agent in the biological sample. Polynucleotide primers and probes may be used to detect the level of mRNA encoding a tumor protein, which is also indicative of the presence or absence of a cancer. In general, a colon tumor sequence should be present at a level that is at least three fold higher in tumor tissue than in normal tissue

[1257] There are a variety of assay formats known to those of ordinary skill in the art for using a binding agent to detect polypeptide markers in a sample. See, e.g., Harlow and Lane, Antibodies. A Laboratory Manual, Cold Spring Harbor Laboratory, 1988. In general, the presence or absence of a cancer in a patient may be determined by (a) contacting a biological sample obtained from a patient with a binding agent; (b) detecting in the sample a level of polypeptide that binds to the binding agent; and (c) comparing the level of polypeptide with a predetermined cut-off value.

[1258] In a preferred embodiment, the assay involves the use of binding agent immobilized on a solid support to bind to and remove the polypeptide from the remainder of the sample. The bound polypeptide may then be detected using a detection reagent that contains a reporter group and specifically binds to the binding agent/polypeptide complex. Such detection reagents may comprise, for example, a binding agent that specifically binds to the polypeptide or an antibody or other agent that specifically binds to the binding agent, such as an anti-immunoglobulin, protein G, protein A or a lectin. Alternatively, a competitive assay may be utilized, in which a polypeptide is labeled with a reporter group and allowed to bind to the immobilized binding agent after incubation of the binding agent with the sample. The extent to which components of the sample inhibit the binding of the labeled polypeptide to the binding agent is indicative of the reactivity of the sample with the immobilized binding agent. Suitable polypeptides for use within such assays include full length colon tumor proteins and portions thereof to which the binding agent binds, as described above.

[1259] The solid support may be any material known to those of ordinary skill in the art to which the tumor protein may be attached. For example, the solid support may be a test well in a microtiter plate or a nitrocellulose or other suitable membrane. Alternatively, the support may be a bead or disc, such as glass, fiberglass, latex or a plastic material such as polystyrene or polyvinylchloride. The support may also be a magnetic particle or a fiber optic sensor, such as those disclosed, for example, in U.S. Pat. No. 5,359,681. The binding agent may be immobilized on the solid support using a variety of techniques known to those of skill in the art, which are amply described in the patent and scientific literature. In the context of the present invention, the term “immobilization” refers to both noncovalent association, such as adsorption, and covalent attachment (which may be a direct linkage between the agent and functional groups on the support or may be a linkage by way of a cross-linking agent). Immobilization by adsorption to a well in a microtiter plate or to a membrane is preferred. In such cases, adsorption may be achieved by contacting the binding agent, in a suitable buffer, with the solid support for a suitable amount of time. The contact time varies with temperature, but is typically between about 1 hour and about 1 day. In general, contacting a well of a plastic microtiter plate (such as polystyrene or polyvinylchloride) with an amount of binding agent ranging from about 10 ng to about 10 μg, and preferably about 100 ng to about 1 μg, is sufficient to immobilize an adequate amount of binding agent.

[1260] Covalent attachment of binding agent to a solid support may generally be achieved by first reacting the support with a bifunctional reagent that will react with both the support and a functional group, such as a hydroxyl or amino group, on the binding agent. For example, the binding agent may be covalently attached to supports having an appropriate polymer coating using benzoquinone or by condensation of an aldehyde group on the support with an amine and an active hydrogen on the binding partner (see, e.g., Pierce Immunotechnology Catalog and Handbook, 1991, at A12-A13).

[1261] In certain embodiments, the assay is a two-antibody sandwich assay. This assay may be performed by first contacting an antibody that has been immobilized on a solid support, commonly the well of a microtiter plate, with the sample, such that polypeptides within the sample are allowed to bind to the immobilized antibody. Unbound sample is then removed from the immobilized polypeptide-antibody complexes and a detection reagent (preferably a second antibody capable of binding to a different site on the polypeptide) containing a reporter group is added. The amount of detection reagent that remains bound to the solid support is then determined using a method appropriate for the specific reporter group.

[1262] More specifically, once the antibody is immobilized on the support as described above, the remaining protein binding sites on the support are typically blocked. Any suitable blocking agent known to those of ordinary skill in the art, such as bovine serum albumin or Tween 20™ (Sigma Chemical Co., St. Louis, Mo.). The immobilized antibody is then incubated with the sample, and polypeptide is allowed to bind to the antibody. The sample may be diluted with a suitable diluent, such as phosphate-buffered saline (PBS) prior to incubation. In general, an appropriate contact time (i.e., incubation time) is a period of time that is sufficient to detect the presence of polypeptide within a sample obtained from an individual with colon cancer. Preferably, the contact time is sufficient to achieve a level of binding that is at least about 95% of that achieved at equilibrium between bound and unbound polypeptide. Those of ordinary skill in the art will recognize that the time necessary to achieve equilibrium may be readily determined by assaying the level of binding that occurs over a period of time. At room temperature, an incubation time of about 30 minutes is generally sufficient.

[1263] Unbound sample may then be removed by washing the solid support with an appropriate buffer, such as PBS containing 0.1% Tween 20™. The second antibody, which contains a reporter group, may then be added to the solid support. Preferred reporter groups include those groups recited above.

[1264] The detection reagent is then incubated with the immobilized antibody-polypeptide complex for an amount of time sufficient to detect the bound polypeptide. An appropriate amount of time may generally be determined by assaying the level of binding that occurs over a period of time. Unbound detection reagent is then removed and bound detection reagent is detected using the reporter group. The method employed for detecting the reporter group depends upon the nature of the reporter group. For radioactive groups, scintillation counting or autoradiographic methods are generally appropriate. Spectroscopic methods may be used to detect dyes, luminescent groups and fluorescent groups. Biotin may be detected using avidin, coupled to a different reporter group (commonly a radioactive or fluorescent group or an enzyme). Enzyme reporter groups may generally be detected by the addition of substrate (generally for a specific period of time), followed by spectroscopic or other analysis of the reaction products.

[1265] To determine the presence or absence of a cancer, such as colon cancer, the signal detected from the reporter group that remains bound to the solid support is generally compared to a signal that corresponds to a predetermined cut-off value. In one preferred embodiment, the cut-off value for the detection of a cancer is the average mean signal obtained when the immobilized antibody is incubated with samples from patients without the cancer. In general, a sample generating a signal that is three standard deviations above the predetermined cut-off value is considered positive for the cancer. In an alternate preferred embodiment, the cut-off value is determined using a Receiver Operator Curve, according to the method of Sackett et al., Clinical Epidemiology: A Basic Science for Clinical Medicine, Little Brown and Co., 1985, p. 106-7. Briefly, in this embodiment, the cut-off value may be determined from a plot of pairs of true positive rates (i.e., sensitivity) and false positive rates (100%-specificity) that correspond to each possible cut-off value for the diagnostic test result. The cut-off value on the plot that is the closest to the upper left-hand corner (i.e., the value that encloses the largest area) is the most accurate cut-off value, and a sample generating a signal that is higher than the cut-off value determined by this method may be considered positive. Alternatively, the cut-off value may be shifted to the left along the plot, to minimize the false positive rate, or to the right, to minimize the false negative rate. In general, a sample generating a signal that is higher than the cut-off value determined by this method is considered positive for a cancer.

[1266] In a related embodiment, the assay is performed in a flow-through or strip test format, wherein the binding agent is immobilized on a membrane, such as nitrocellulose. In the flow-through test, polypeptides within the sample bind to the immobilized binding agent as the sample passes through the membrane. A second, labeled binding agent then binds to the binding agent-polypeptide complex as a solution containing the second binding agent flows through the membrane. The detection of bound second binding agent may then be performed as described above. In the strip test format, one end of the membrane to which binding agent is bound is immersed in a solution containing the sample. The sample migrates along the membrane through a region containing second binding agent and to the area of immobilized binding agent. Concentration of second binding agent at the area of immobilized antibody indicates the presence of a cancer. Typically, the concentration of second binding agent at that site generates a pattern, such as a line, that can be read visually. The absence of such a pattern indicates a negative result. In general, the amount of binding agent immobilized on the membrane is selected to generate a visually discernible pattern when the biological sample contains a level of polypeptide that would be sufficient to generate a positive signal in the two-antibody sandwich assay, in the format discussed above. Preferred binding agents for use in such assays are antibodies and antigen-binding fragments thereof. Preferably, the amount of antibody immobilized on the membrane ranges from about 25 ng to about 1 μg, and more preferably from about 50 ng to about 500 ng. Such tests can typically be performed with a very small amount of biological sample.

[1267] Of course, numerous other assay protocols exist that are suitable for use with the tumor proteins or binding agents of the present invention. The above descriptions are intended to be exemplary only. For example, it will be apparent to those of ordinary skill in the art that the above protocols may be readily modified to use colon tumor polypeptides to detect antibodies that bind to such polypeptides in a biological sample. The detection of such colon tumor protein specific antibodies may correlate with the presence of a cancer.

[1268] A cancer may also, or alternatively, be detected based on the presence of T cells that specifically react with a colon tumor protein in a biological sample. Within certain methods, a biological sample comprising CD4⁺ and/or CD8⁺ T cells isolated from a patient is incubated with a colon tumor polypeptide, a polynucleotide encoding such a polypeptide and/or an APC that expresses at least an immunogenic portion of such a polypeptide, and the presence or absence of specific activation of the T cells is detected. Suitable biological samples include, but are not limited to, isolated T cells. For example, T cells may be isolated from a patient by routine techniques (such as by Ficoll/Hypaque density gradient centrifugation of peripheral blood lymphocytes). T cells may be incubated in vitro for 2-9 days (typically 4 days) at 37° C. with one or more representative polypeptides (e.g., 5-25 μg/ml). It may be desirable to incubate another aliquot of a T cell sample in the absence of colon tumor polypeptide to serve as a control. For CD4⁺ T cells, activation is preferably detected by evaluating proliferation of the T cells. For CD8⁺ T cells, activation is preferably detected by evaluating cytolytic activity. A level of proliferation that is at least two fold greater and/or a level of cytolytic activity that is at least 20% greater than in disease-free patients indicates the presence of a cancer in the patient.

[1269] As noted above, a cancer may also, or alternatively, be detected based on the level of mRNA encoding a colon tumor protein in a biological sample. For example, at least two oligonucleotide primers may be employed in a polymerase chain reaction (PCR) based assay to amplify a portion of a colon tumor cDNA derived from a biological sample, wherein at least one of the oligonucleotide primers is specific for (i.e., hybridizes to) a polynucleotide encoding the colon tumor protein. The amplified cDNA is then separated and detected using techniques well known in the art, such as gel electrophoresis. Similarly, oligonucleotide probes that specifically hybridize to a polynucleotide encoding a colon tumor protein may be used in a hybridization assay to detect the presence of polynucleotide encoding the tumor protein in a biological sample.

[1270] To permit hybridization under assay conditions, oligonucleotide primers and probes should comprise an oligonucleotide sequence that has at least about 60%, preferably at least about 75% and more preferably at least about 90%, identity to a portion of a polynucleotide encoding a colon tumor protein that is at least 10 nucleotides, and preferably at least 20 nucleotides, in length. Preferably, oligonucleotide primers and/or probes will hybridize to a polynucleotide encoding a polypeptide disclosed herein under moderately stringent conditions, as defined above. Oligonucleotide primers and/or probes which may be usefully employed in the diagnostic methods described herein preferably are at least 10-40 nucleotides in length. In a preferred embodiment, the oligonucleotide primers comprise at least 10 contiguous nucleotides, more preferably at least 15 contiguous nucleotides, of a DNA molecule having a sequence recited in SEQ ID NO: 1-121, 123-197, 205-630, 632-684, 686, 690-691, 694-1058, 1069, 1071-1076, 1082, 1084, 1086, 1092, 1094, 1096-1101, 1103-1106, 1111-1114, 1119, 1120, and 1125. Techniques for both PCR based assays and hybridization assays are well known in the art (see, for example, Mullis et al., Cold Spring Harbor Symp. Quant. Biol., 51:263, 1987; Erlich ed., PCR Technology, Stockton Press, NY, 1989).

[1271] One preferred assay employs RT-PCR, in which PCR is applied in conjunction with reverse transcription. Typically, RNA is extracted from a biological sample, such as biopsy tissue, and is reverse transcribed to produce cDNA molecules. PCR amplification using at least one specific primer generates a cDNA molecule, which may be separated and visualized using, for example, gel electrophoresis. Amplification may be performed on biological samples taken from a test patient and from an individual who is not afflicted with a cancer. The amplification reaction may be performed on several dilutions of cDNA spanning two orders of magnitude. A two-fold or greater increase in expression in several dilutions of the test patient sample as compared to the same dilutions of the non-cancerous sample is typically considered positive.

[1272] In another embodiment, the disclosed compositions may be used as markers for the progression of cancer. In this embodiment, assays as described above for the diagnosis of a cancer may be performed over time, and the change in the level of reactive polypeptide(s) or polynucleotide evaluated. For example, the assays may be performed every 24-72 hours for a period of 6 months to 1 year, and thereafter performed as needed. In general, a cancer is progressing in those patients in whom the level of polypeptide or polynucleotide detected increases over time. In contrast, the cancer is not progressing when the level of reactive polypeptide or polynucleotide either remains constant or decreases with time.

[1273] Certain in vivo diagnostic assays may be performed directly on a tumor. One such assay involves contacting tumor cells with a binding agent. The bound binding agent may then be detected directly or indirectly via a reporter group. Such binding agents may also be used in histological applications. Alternatively, polynucleotide probes may be used within such applications.

[1274] As noted above, to improve sensitivity, multiple colon tumor protein markers may be assayed within a given sample. It will be apparent that binding agents specific for different proteins provided herein may be combined within a single assay. Further, multiple primers or probes may be used concurrently. The selection of tumor protein markers may be based on routine experiments to determine combinations that results in optimal sensitivity. In addition, or alternatively, assays for tumor proteins provided herein may be combined with assays for other known tumor antigens.

Diagnostic Kits

[1275] The present invention further provides kits for use within any of the above diagnostic methods. Such kits typically comprise two or more components necessary for performing a diagnostic assay. Components may be compounds, reagents, containers and/or equipment. For example, one container within a kit may contain a monoclonal antibody or fragment thereof that specifically binds to a colon tumor protein. Such antibodies or fragments may be provided attached to a support material, as described above. One or more additional containers may enclose elements, such as reagents or buffers, to be used in the assay. Such kits may also, or alternatively, contain a detection reagent as described above that contains a reporter group suitable for direct or indirect detection of antibody binding.

[1276] Alternatively, a kit may be designed to detect the level of mRNA encoding a colon tumor protein in a biological sample. Such kits generally comprise at least one oligonucleotide probe or primer, as described above, that hybridizes to a polynucleotide encoding a colon tumor protein. Such an oligonucleotide may be used, for example, within a PCR or hybridization assay. Additional components that may be present within such kits include a second oligonucleotide and/or a diagnostic reagent or container to facilitate the detection of a polynucleotide encoding a colon tumor protein.

[1277] The following Examples are offered by way of illustration and not by way of limitation.

### EXAMPLES

### Example 1

### Isolation and Characterization of Colon Tumor Polypeptides by PCR-Based Subtraction and Microarray Analaysis

[1278] A cDNA library was constructed in the PCR2.1 vector (Invitrogen, Carlsbad, Calif.) by subtracting a pool of three colon tumors with a pool of normal colon, spleen, brain, liver, kidney, lung, stomach and small intestine using PCR subtraction methodologies (Clontech, Palo Alto, Calif.). The subtraction was performed using a PCR-based protocol, which was modified to generate larger fragments. Within this protocol, tester and driver double stranded cDNA were separately digested with five restriction enzymes that recognize six-nucleotide restriction sites (MluI, MscI, PvuII, SalI and StuI). This digestion resulted in an average cDNA size of 600 bp, rather than the average size of 300 bp that results from digestion with RsaI according to the Clontech protocol. This modification did not affect the subtraction efficiency. Two tester populations were then created with different adapters, and the driver library remained without adapters.

[1279] The tester and driver libraries were then hybridized using excess driver cDNA. In the first hybridization step, driver was separately hybridized with each of the two tester cDNA populations. This resulted in populations of (a) unhybridized tester cDNAs, (b) tester cDNAs hybridized to other tester cDNAs, (c) tester cDNAs hybridized to driver cDNAs, and (d) unhybridized driver cDNAs. The two separate hybridization reactions were then combined, and rehybridized in the presence of additional denatured driver cDNA. Following this second hybridization, in addition to populations (a) through (d), a fifth population (e) was generated in which tester cDNA with one adapter hybridized to tester cDNA with the second adapter. Accordingly, the second hybridization step resulted in enrichment of differentially expressed sequences which could be used as templates for PCR amplification with adaptor-specific primers.

[1280] The ends were then filled in, and PCR amplification was performed using adaptor-specific primers. Only population (e), which contained tester cDNA that did not hybridize to driver cDNA, was amplified exponentially. A second PCR amplification step was then performed, to reduce background and further enrich differentially expressed sequences.

[1281] This PCR-based subtraction technique normalizes differentially expressed cDNAs so that rare transcripts that are over-expressed in colon tumor tissue may be recoverable. Such transcripts would be difficult to recover by traditional subtraction methods.

[1282] To characterize the complexity and redundancy of the subtracted library, 96 clones were randomly picked and 65 were sequenced, as previously described. These sequences were further characterized by comparison with the most recent Genbank database (April, 1998) to determine their degree of novelty. No significant homologies were found to 21 of these clones, hereinafter referred to as 11092, 11093, 11096, 11098, 11103, 11174, 11108, 11112, 11115, 11117, 11118, 11134, 11151, 11154, 11158, 11168, 11172, 11175, 11184, 11185 and 11187. The determined cDNA sequences for these clones are provided in SEQ ID NO: 48, 49, 52, 54, 59, 60, 65-69, 79, 89, 90, 93, 99-101 and 109-111, respectively.

[1283] Two-thousand clones from the above mentioned cDNA subtraction library were randomly picked and submitted to a round of PCR amplification. Briefly, 0.5 μl of glycerol stock solution was added to 99.5 μl of pcr MIX (80 μl H₂0, 10 μl 10×PCR Buffer, 6 μl 25 mM MgCl₂, 1 μl 10 mM dNTPs, 1 μl 100 mM M13 forward primer (CACGACGTTGTAAAACGACGG) (SEQ ID NO: 688), 1 μl 100 mM M13 reverse primer (CACAGGAAACAGCTATGACC) (SEQ ID NO: 689)), and 0.5 μl 5 u/ml Taq polymerase (primers provided by (Operbn Technologies, Alameda, Calif.). The PCR amplification was run for thirty cycles under the following conditions: 95° C. for 5 min., 92° C. for 30 sec., 57° C. for 40 sec., 75° C. for 2 min. and 75° C. for 5 minutes.

[1284] mRNA expression levels for representative clones were determined using microarray technology (Synteni, Palo Alto, Calif.) in colon tumor tissues (n=25), normal colon tissues (n=6), kidney, lung, liver, brain, heart, esophagus, small intestine, stomach, pancreas, adrenal gland, salivary gland, resting PBMC, activated PBMC, bone marrow, dendritic cells, spinal cord, blood vessels, skeletal muscle, skin, breast and fetal tissues. The number of tissue samples tested in each case was one (n=1), except where specifically noted above; additionally, all the above-mentioned tissues were derived from humans. The PCR amplification products were dotted onto slides in an array format, with each product occupying a unique location in the array. mRNA was extracted from the tissue sample to be tested, and fluorescent-labeled cDNA probes were generated by reverse transcription according to the protocol provided by Synteni. The microarrays were probed with the labeled cDNA probes, the slides scanned, and fluorescence intensity was measured. This intensity correlates with the hybridization intensity.

[1285] One hundred and forty nine clones showed two or more fold over-expression in the colon tumor probe group as compared to the normal tissue probe group. These cDNA clones were further characterized by DNA sequencing with a Perkin Elmer/Applied Biosystems Division Automated Sequencer Model 373A and/or Model 377 (Foster City, Calif.). These sequences were compared to known sequences in the most recent GenBank database. No significant homologies to human gene sequences were found in forty nine of these clones, represented by the following sixteen cDNA consensus sequences: SEQ ID NO: 2, 8, 15, 16, 22, 24, 30, 32-34, 36, 38, 40, 41, 46 and 47, hereinafter referred to as Contig 2, 8, 13, 14, 20, 23, 29, 31, 35, 32, 36, 38, 41, 42, 50 and 51, respectively). Contig 29 (SEQ ID NO: 30) was found to be a Rat GSK-3-β-interacting protein Axil homolog. Also, Contigs 31 and 35 (SEQ ID NO: 32 and 33, respectively) were found to be a Mus musculus GOB-4 homolog. The determined cDNA sequences of SEQ ID NO: 1, 3-7,9-14, 17-21, 23, 25-29, 31, 35, 37, 39, 42-45, 50, 51, 53, 55-58, 61-64, 70-78, 80-88, 91, 92, 94-98, 102-108 and 112 were found to show some homology to previously identified genes sequences.

[1286] Microarray analysis demonstrated Contig 2 (SEQ ID NO: 2) showed over-expression in 34% of colon tumors tested, as well as increased expression in normal pancreatic tissue, with no over-expression in normal colon tissues. Upon further analysis, Contigs 2, 8 and 23 were found to share homology to the known gene GW112. Contigs 4, 5, 9 and 52 showed homology to carcinoembryonic antigen (SEQ ID NO: 3, 4, 5 and 6, respectively). A representative sampling of these fragments showed over-expression in 85% of colon tumors, with over-expression in normal bone marrow and 3/6 normal colon tissues. Contig 6 (SEQ ID NO: 7), showing homology to the known gene sequence for villin, and was over-expressed in about half of all colon tumors tested, with a limited degree of low level over-expression in normal colon. Contig 12 (SEQ ID NO: 14), showing homology to Chromosome 17, clone hRPC.1171_I_{—}10, also referred to as C798P, was over-expressed in approximately 70% of colon tumors tested, with low over-expression in ⅙ normal colon samples. Contig 14, also referred to as 14261 (SEQ ID NO: 16), showing no significant homology to any known gene, showed over-expression in 44% of colon tumors tested, with low level expression in half of normal colon tissues, as well as small intestine and pancreatic tissue. Contig 18 (SEQ ID NO: 21), showing homology to the known gene for L1-cadherin, showed over-expression in approximately half of colon tumors and low level over-expression in 3/6 normal colon tissues tested. Contig 22 (SEQ ID NO: 23), showing homology to Bumetanide-sensitive Na—K—Cl cotransporter was over-expressed in 70% of colon tumors and no over-expression in all normal tissues tested. Contig 25 (SEQ ID NO: 25), showing homology to macrophage inflammatory protein-3α, was over-expressed in over 40% of colon tumors and in activated PBMC. Contigs 26 and 48 (SEQ ID NOS: 25 and 26), showing homology to the sequence for laminin, was over-expressed in 48% of colon tumors and with low over-expression in stomach tissue. Contig 28 (SEQ ID NO: 29), showing homology to the known gene sequence for Chromosome 16 BAC clone CIT987SK-A-363E6, was over-expressed in 33% of colon tumors tested with normal stomach and 2/6 normal colon tissues showing low level over-expression. Contigs 29, 31 and 35 (SEQ ID NOS: 30, 32 and 33, respectively), also referred to as C751P, an unknown sequence showing limited and partial homology to Rat GSK-3β-interacting protein Axil homolog and Mus musculus GOB-4 homolog, was over-expressed in 74% of colon tumors and no over-expression in all normal tissues tested. Contig 34 (SEQ ID NO: 35), showing homology to the known sequence for desmoglein 2, was over-expressed in 56% of colon tumors and showed low level over-expression in ⅙ normal colon tissues. Contig 36 (SEQ ID NO: 36), an unknown sequence also referred to as C793P, showed over-expression in 30% of colon tumor tissues tested. Contig 37 and 14287.2 (SEQ ID NOS: 37 and 116), an unknown sequence, but with limited (89%) homology to the known sequence for putative transmembrane protein was over-expressed in 70% of colon tumors, as well as in normal lung tissue and 3/6 normal colon tissues tested. Contig 38, also referred to as C796P and 14219 (SEQ ID NO: 38), showing no significant homology to any known gene, was over-expressed in 38% in colon tumors and no elevated over-expression in any normal tissues. Contig 41 (SEQ ID NO: 40), also referred to as C799P and 14308, an unknown sequence showing no significant homology to any known gene, was over-expressed in 22% of colon tumors. Contig 42, (SEQ ID NO: 41), also referred to as C794P and 14309, an unknown sequence with no significant homology to any known gene, was over-expressed in 63% of colon tumors tested, as well as in 3/6 normal colon tissues. Contig 43 (SEQ ID NO: 42), showing homology to the known sequence for Chromosome 1 specific transcript KIAA0487 was over-expressed in 85% of colon tumors tested and in normal lung and 4/6 normal colon tissues. Contig 49 (SEQ ID NO: 45), showing homology to the known sequence for pump-1, was over-expressed in 44% of colon tumors and no over-expression in all normal tissues tested. Contig 50 (SEQ ID NO: 46), also referred to as C792P and 18323, showing no significant homology to any known gene, was over-expressed in 33% of colon tumors with no detectable over-expression in any normal tissues tested. Contig 51 (SEQ ID NO: 47), also referred to as C795P and 14317 was over-expressed in 11% of colon tumors.

[1287] Additional microarray analysis yielded seven clones showing two or more fold over-expression in the colon tumor probe group as compared to the normal tissue probe group. Three of these clones demonstrated particularly good colon tumor specificity, and are represented by SEQ ID NO: 115, 116 and 120. Specifically, SEQ ID NO: 115, referred to as C791P or 14235, which shows homology to the known gene sequence for H. sapiens chromosome 21 derived BAC containing ets-2 gene, was over-expressed in 89% of colon tumors tested and in ⅚ normal colon tissues, as well as over-expressed at low levels in normal lung and activated PBMC. Microarray analysis for SEQ ID NO: 116 is discussed above. SEQ ID NO: 120, referred to as 14295, showing homology to the known gene sequence for secreted cement gland protein XAG-2 homolog, was over-expressed in 70% of colon tumors and in ⅚ normal colon tissues, as well as low level over-expression in normal small intestine, stomach and lung. All clones showing over-expression in colon tumor were sequenced and these sequences compared to the most recent Genbank database (Feb. 12, 1999). Of the seven clones, three contained sequences that did not share significant homology to any known gene sequences, represented by SEQ ID NO: 116, 117 and 119. To the best of the inventors' knowledge, none of these sequences have been previously shown to be present in colon. The determined cDNA sequences of the remaining clones (SEQ ID NO: 113-115 and 120) were found to show some homology to previously identified genes.

[1288] Further analysis identified a clone which was recovered several times by PCR subtraction and by expression screening using a mouse anti-scid antiserum. The determined full length cDNA sequence for this clone is provided in SEQ ID NO: 121, with the corresponding predicted amino acid sequence being provided in SEQ ID NO: 122. This clone is homologous with the known gene Beta IG-H3, as disclosed in U.S. Pat. No. 5,444,164. Microarray analysis demonstrated this clone to be over-expressed in 75 to 80% of colon tumors tested (n=27), with no over-expression in normal colon samples (n=6), but with some low level over-expression in other normal tissues tested.

[1289] Further analysis of the PCR-subtraction library described above led to the isolation of longer cDNA sequences for the clones of SEQ ID NO: 30, 115, 46, 118, 41, 47, 38, 113, 14 and 40 (known as C751P, C791P, C792P, C793P, C794P, C795P, C796P, C797P, C798P and C799P, respectively). These determined cDNA sequences are provided in SEQ ID NO: 123-132, respectively. Additional sequences for the clones C794P and C799P are shown in SEQ ID NO:683 and 684, respectively, and the predicted amino acid sequences are shown in SEQ ID NO:685 and 686, respectively. Still further sequences for the clones C794P and C799P are shown in. SEQ ID NO: 691 and 690, respectively, and to the predicted amino acid sequence as shown in SEQ ID NO: 693 and 692, respectively.

[1290] Using PCR subtraction methodology described above with minor modifications, transcripts from a pool of three moderately differentiated colon adenocarcinoma samples were subtracted with a set of transcripts from normal brain, pancreas, bone marrow, liver, heart, lung, stomach and small intestine. Modifications of the above protocol were included at the cDNA digestion steps and in the tester to drive hybridization ratios. In a first subtraction, the restriction enzymes PvuII, Dral, MscI and Stul were used to digest cDNAs, and the tester to driver ratio was 1:40, as suggested by Clontech. In a second subtraction, Dral, MscI and Stul were used for cDNA digestion and a tester to driver ratio of 1:76 was used. Following the PCR amplification steps, the cDNAs were clones into pCR2.1 plasmid vector. The determined cDNA sequences of 167 isolated clones are provided in SEQ ID NO: 205-371. These sequences were compared to sequences in the public databases as described above. The sequences of SEQ ID NO: 205, 207, 210-212, 214, 215, 218, 224-226, 228, 233, 234, 236, 238, 241, 242, 245, 246, 248, 250, 253, 254, 256, 259, 260, 262, 263, 266, 267, 270-273, 279, 282, 291, 293, 294, 298, 300, 302, 303, 310-313, 315, 317, 320, 322, 324, 332-335, 345, 347, 356, 358, 361, 362, 366, 369 and 371 were found to show some homology to previously identified ESTs. The remaining sequences were found to show some homology to previously identified genes.

[1291] Using the PCR subtraction technology described above, a cDNA library from a pool of primary colon tumors was subtracted with a cDNA library prepared from normal tissues, including brain, bone marrow, kidney, heart, lung, liver, pancreas, small intestine, stomach and trachea. The determined cDNA sequences for 90 clones isolated in this subtraction are provided in SEQ ID NO: 372-461. Comparison of these sequences with those in the public databases as described above, revealed no homologies to the sequences of SEQ ID NO: 426, 445 and 453. The sequences of SEQ ID NO: 372-378, 380-404, 406, 409-417, 419-423, 425, 427-429, 433-436, 438-441, 443, 446-451, 454, 455 and 457-461 showed some homology to previously identified genes, while the sequences of SEQ ID NO: 379, 405, 407, 408, 418, 424, 430-432, 437, 442, 444, 452 and 456 showed some homology to previously isolated ESTs.

[1292] Using the PCR subtraction methodology described above, a cDNA library prepared from a pool of metastatic colon tumors was subtracted with cDNA from a pool of normal tissues, namely brain, heart, lung, lymph nodes, PBMC, pancreas, small intestine and stomach. The determined cDNA sequences for 82 clones isolated from the subtracted library are provided in SEQ ID NO: 487-568 (referred to as contigs 1-56 and 58-83, respectively). The sequences of SEQ ID NO: 487, 489, 490, 493-496, 499, 501-509, 511-518, 520-526, 529-542, 544, 546, 548-552, 554, 555, 557, 558, 560, 562, 563, 566 and 567 showed some homology to previously identified gene sequences. The sequences of SEQ ID NO: 488, 491, 492, 497, 498, 500, 510, 519, 527, 528, 543, 545, 547, 553, 559, 564, 564 and 568 showed some homology to previously isolated ESTs.

### Example 2

### Isolation of Tumor Polypeptides Using SCID Mouse-Passaged Tumor RNA

[1293] This Example discloses the preparation of antisera against shed/secreted antigens from SCID mice bearing human colon tumors. These antisera may be useful, for example, in the screening of cDNA libraries made from the original human colon tumors for secreted antigens that may, in turn, be useful for identification of therapeutic and/or diagnostic candidates.

[1294] Human colon tumor antigens were obtained using SCID mouse passaged colon tumor RNA as follows. Human colon tumor was implanted in SCID mice and harvested, as described in patent application Ser. No. 08/556,659 filed Nov. 13, 1995, U.S. Pat. No. 5,986,170. First strand cDNA was synthesized from poly A+ RNA from three SCID mouse-passaged colon tumors using a Lambda ZAP Express cDNA synthesis kit (Stratagene). The reactions were pooled and digested with RNase A, T1 and H to cleave the RNA and then treated with NaOH to degrade the RNA. The resulting cDNA was annealed with biotinylated (Vector Labs, Inc., Burlingame, Calif.) cDNA from a normal resting PBMC plasmid library (constructed from Superscript plasmid System, Gibco BRL), and subtracted with streptavidin by phenol/chloroform extraction. Second strand cDNA was synthesized from the subtracted first strand cDNA and digested with S1 nuclease (Gibco BRL). The cDNA was blunted with Pfu polymerase and EcoRI adaptors (Stratagene) were ligated to the ends. The cDNA was phosphorylated with T4 polynucleotide kinase, digested with restriction endonuclease XhoI, and size selected with Sephacryl S-400 (Sigma). Fractions were pooled, ligated to Lambda ZAP Express arms (Stratagene) and packaged with Gigapack Gold III extract (Stratagene). Random plaques were picked, phagemid was excised, transformed into XLOLR cells (Stratagene) and resulting plasmid DNA (Qiagen Inc., Valencia, Calif.) was sequenced as described above.

[1295] The determined cDNA sequences for 17 clones isolated as described above are provided in SEQ ID NO: 133-151, wherein 133 and 134 represent partial sequences of a clone referred to as CoSub-3 and SEQ ID NO: 135 and 136 represent partial sequences of a clone referred to as CoSub-13. These sequences were compared with those in the public databases as described above. The sequences of SEQ ID NO: 139 and 149 showed no significant homologies to any previously identified sequences. The sequences of SEQ ID NO: 138, 140, 141, 142, 143, 148 and 149 showed some homology to previously isolated expressed sequence tags (ESTs). The sequences of SEQ ID NO: 133-137, 144-147, 150 and 151 showed some homology to previously isolated gene sequences.

[1296] The determined cDNA sequences for an additional 46 clones isolated as described above, are provided in SEQ ID NO: 569-616, wherein SEQ ID NO: 573 and 574 represent the 3′ and 5′ determined cDNA sequences, respectively, for clone CS1-106, and SEQ ID NO: 579 and 580 represent the determined 3′ and 5′ cDNA sequences, respectively, for clone CS1-124. Comparison of the isolated sequences with those in the public databases revealed no significant homologies to the sequences of SEQ ID NO: 580, 585, 610 and 613. The sequences of SEQ ID NO: 569, 574-577, 584, 587, 592, 595, 598, 603 and 608 showed some homology to previously isolated ESTs, while the sequences of SEQ ID NO: 570-573, 578, 581-583, 586, 588-591, 593, 594, 596, 597, 599-602, 604-607, 609, 611, 612 and 514-616 showed some homology to previously isolated gene sequences.

### Example 3

### Use of Mouse Antisera to Identify DNA Sequences Encoding Colon Tumor Antigens

[1297] This example illustrates the isolation of cDNA sequences encoding colon tumor antigens by screening of colon tumor cDNA libraries with mouse anti-tumor sera.

[1298] A cDNA expression library was prepared from SCID mouse-passaged human colon tumor poly A+ RNA using a Stratagene (La Jolla, Calif.) Lambda ZAP Express kit, following the manufacturer's instructions. Sera was obtained from the colon tumor-bearing SCID mouse. This serum was injected into normal mice to produce anti-colon tumor serum. Approximately 600,000 PFUs were screened from the unamplified library using this antiserum. Using a goat anti-mouse IgG-A-M (H+ L) alkaline phosphatase second antibody developed with NBT/BCIP (BRL Labs.), positive plaques were identified. Phage was purified and phagemid excised for several clones with inserts in a pBK-CMV vector for expression in prokaryotic or eukaryotic cells.

[1299] The determined cDNA sequences for 46 of the isolated clones are provided in SEQ. ID NO: 152-197. The predicted amino acid sequences for the cDNA sequences of SEQ ID NO: 187, 188, 189, 190, 194, 195 and 197 are provided in SEQ ID NO: 198-204, respectively. The determined cDNA sequences were compared with those in the public database as described above. The sequences of SEQ ID NO: 156, 168, 184, 189, 192 and 196 showed some homology to previously isolated ESTs. The sequences of SEQ ID NO: 152-155, 157-167, 169-182, 183, 185-188, 190, 194, 195 and 197 showed some homology to previously identified genes.

[1300] The determined cDNA sequences for an additional eleven clones isolated as described above, are provided in SEQ ID NO: 617-627. Comparison of these sequences with those in the public database as described above revealed no known homologies to SEQ ID NO: 621 and 623. The sequences of SEQ ID NO: 622 and 626 were found to show some homology to previously isolated ESTs, while the sequences of SEQ ID NO: 617-620, 624, 625 and 627 showed some homology to previously identified genes.

[1301] In further studies, a cDNA library was prepared from SCID-mouse grown colon tumors and screened with mouse anti-SCID serum as described above. Briefly first strand cDNA was synthesized from poly A+ RNA from three SCID mouse-grown human colon tumors using a Lambda ZAP Express cDNA synthesis kit (Stratagene). The reactions were pooled and digested with RNase A, T1 and H to cleave the RNA and then treated with NaOH to degrade the RNA. The cDNA was annealed with biotinylated cDNA from a normal resting PBMC plasmid library (constructed from Superscript plasmid system; Gibco BRL) and subtracted with streptavidin by phenol/chloroform extraction. Second strand cDNA was synthesized from the subtracted first strand cDNA and digested with S1 nuclease. The cDNA was blunted with Pfu polymerase and EcoRI adaptors were ligated to the ends. The cDNA was phosphorylated with T4 polynucleotide kinase, digested with restriction endonuclease XhoI, and size selected with Sephacryl S-400 (Sigma). Fractions were pooled, ligated to Lambda ZAP Express arms (Stratagene) and packaged with Gigapack Gold III extract (Stratagene). The resulting library was screened with a mouse antiserum raised against serum from SCID mice containing human colon tumors, including the three tumors used to prepare the cDNA libraries.

[1302] The determined cDNA for one clone isolated using this procedure is provided in SEQ ID NO: 630. This clone was found to show homology to a previously identified gene. The amino acid sequence encoded by the clone of SEQ ID NO: 630 is provided in SEQ ID NO: 631.

[1303] In subsequent studies, an additional cDNA library was prepared from a SCID-passaged human colon tumor and screened with a mouse antiserum raised against serum from the SCID mouse containing the colon tumor. The determined cDNA sequences for 51 clones isolated in these studies are provided in SEQ ID NO: 632-682. Comparison of these sequences with those in the public databases revealed no significant homologies to the sequences of SEQ ID NO: 648 and 668. The sequence of SEQ ID NO: 642 showed some homology to previously isolated ESTs. The sequences of SEQ ID NO: 632-641, 643-647, 649-667 and 669-682 were found to show some homology to previously identified genes. SEQ ID NO: 684 and SEQ ID NO: 690 showed homology to human NADH/NADPH thyroid oxidase p138-tox mRNA.

### Example 4

### Isolation and Characterization of Colon Tumor Polypeptides by Conventional Substraction

[1304] Two cDNA libraries were constructed and used to create a subtracted cDNA library as follows.

[1305] Using the GibcoBRL Superscript Plasmid System with minor modifications, two cDNA libraries were created. The first library, referred to as CTCL, was prepared from a pool of mRNA samples from three colon adenocarcinoma tissue samples. Two of the samples were described as Duke's stage C and one as Duke's stage B. All three samples were grade III in histological status. A second library (referred to as DriverLibpcDNA3.1+) was prepared from a pool of normal tissues, namely liver, pancreas, skin, bone marrow, resting PBMC, stomach and brain. Both libraries were prepared using the manufacturer's instructions with the following modifications: an EcoRI-NotI 5′ cDNA adapter was used instead of the provided reagent; the vector pcDNA3.1(+) (Invitrogen) was substituted for the pSPORT vector; and the ligated DNA molecules were transformed into ElectroMaxDH10B electrocompetent cells. Clones from the libraries were analyzed by restriction digest and sequencing to determine average insert size, quality of the library and complexity of the library. DNA was prepared from each library and digested.

[1306] The driver DNA was biotinylated and hybridized with the colon library tester DNA at a ratio of 10:1. After two rounds of hybridizations, streptavidin incubations and extractions, the remaining colon cDNAs were size-selected by column chromatography and cloned into the pCMV-Script vector from Stratagene. Clones from this subtracted library (referred to as CTCL-S1) were characterized as described above for the unsubtracted libraries.

[1307] The determined cDNA sequences for 20 clones isolated from the CTCL-S 1 library are provided in SEQ ID NO: 462-479, 628 and 629. Comparison of these sequences with those in the public databases, as described above, revealed no significant homologies to the sequences of SEQ ID NO: 476, 477 and 479. The remaining sequences showed some homology to previously identified genes.

[1308] In further studies, a cDNA library was prepared from a pool of mRNA from three metastatic colon adenocarcinomas derived from liver tissue samples. All samples were described as Duke's stage D. Conventional subtraction was performed as described above, using the DriverLibpcDNA3.1+library described above as the driver. The resulting subtracted library (referred to as CMCL-S1) was characterized by isolating a set of clones for restriction analysis and sequencing.

[1309] The determined cDNA sequences for 7 clones isolated from the CMCL-S1 library are provided in SEQ ID NO: 480-486. Comparison of these sequences with those in the public databases revealed no significant homologies to the sequence of SEQ ID NO: 483. The sequences of SEQ ID NO: 480-482 and 484-486 were found to show some homology to previously identified genes.

### Example 5

### Expression OF RA12-C884P Fusion Protein in E. Coli

[1310] PCR was used to amplify the C884P cDNA (SEQ ID NO:1052) using the primers below and a colon cDNA library (648A). The PCR product was cloned to pCRX2 at EcoR I and Xho I site, downstream of 130 amino acid segment of the Ral2 protein. Three clones (Clone Identifier NO: 61698, 61699 and 61700) were all confirmed by DNA sequence. The cDNA encoding the Ral2-C884P fusion is set forth in SEQ ID NO: 1084 and the corresponding predicted amino acid sequence is disclosed in SEQ ID NO: 1085.

[1311] The following primers were used for PCR amplification of C884P:

080300-A (Primer Identifier 7839):

(SEQ ID NO:1088)

5′-cgagcgaattcatatgggtacgagtaagcaatg-3′
(5′Eco RI site).
080300-B (Primer ID 7840):

(SEQ ID NO:1089)

5′-gcgatgcctcgagttatttgttcccgatctggc-3′
(3′Xho I site).

[1312] The predicted protein has the following features: Protein sequence information: Molecular Weight 36466.18 Daltons; 344 Amino Acids; 21 Strongly Basic (+) Amino Acids (K,R); 27 Strongly Acidic (−) Amino Acids (D,E); 144 Hydrophobic Amino Acids (A,I,L,F,W,V); 88 Polar Amino Acids (N,C,Q,S,T,Y); 6.165 Isolectric Point; −4.709 Charge at PH 7.0.

[1313] Mini-induction screening of Ra12-C884P in numerous E. coli hosts, using various temperature, culture media and concentrations of IPTG, showed a protein band at expected MW of 36.5 kDa, visible by western blot but not by SDS-PAGE/Coomassie staining. The best expression condition was in BLR(DE3)pLysS host and recombinant protein induced by IPTG at 30° C. for 2 hours.

### Example 6

### Expression of RA12-C888P Fusion Protein in E. Coli

[1314] PCR was used to amplify the ORF of C888P (SEQ ID NO:1076; Clone Identifier No: 37983) from a colon cDNA library (648A) using the following primers:

Sense Primer -080300-C (Primer 1D7841):

(SEQ ID 1090)

5′ - gcatgcatgcggccgcacaagaggggaagtttagtgg - 3′
(5′Not I site)
Antisense Primer -080300-D (Primer 1D7842):

(SEQ ID NO:1091)

5′ - gcgatgcctcgagtcagcttctcagaggtttgacttc - 3′
(3′Xho I site)

[1315] The PCR product was cloned into the pZeroBlunt vector (Invitrogen, Carlsbad, Calif.) and confirmed by DNA sequencing. The C888P insert was cut with Not I and Xho I and subcloned into pCRX2 linearized with the same two enzymes. A clone (clone identifier 66481) was confirmed by DNA sequencing. The cDNA sequence encoding the Ra12C888P fusion protein (R.C888P) is disclosed in SEQ ID NO:1086 and the corresponding predicted amino acid sequence is disclosed in SEQ ID NO: 1087.

[1316] The predicted R.C888P protein has the following features: molecular weight 104429.77 Daltons; 958 Amino Acids; 78 Strongly Basic(+) Amino Acids (K,R); 116 Strongly Acidic(−).Amino Acids (D,E); 331 Hydrophobic Amino Acids (A,I,L,F,W,V); 260 Polar Amino Acids (N,C,Q,S,T,Y); 4.985 Isolectric Point: −34.173 Charge at PH 7.0

[1317] Multiple “mini” expression screens were performed to determine the optimal induction conditions. E. coli expression hosts were tested in various culture conditions, with notable full length expression but also multiple breakdown products. To test for reduction of breakdown product and maximize clean recombinant production, Tuner (DE3) C+RIL and C+RP cells were induced at varied IPTG concentrations. Coomassie stained SDS-PAGE showed a specifically induced band at about 100 kD and western blot confirmed with anti-6xhis tag Ab. Western blot also showed no breakdown products at 0.1 mM IPTG concentration. Tuner (DE3) C+RP expression host grows best (high cell density) with optimal expression of R.C888P in 2xYS media at 25° C. induced with 0.1 mM IPTG at 25° C. for 3 hr.

### Example 7

### Database Analysis of C794P cDNA Encoding Colon Tumor Protein

[1318] Database searches were performed with C794P (SEQ ID NOs:41, 127, 683, 691). Sequence similarity was seen to cDNA FLJ20063 and the RECC gene (SEQ ID NO: 1092). This RECC sequence is longer than the FLJ20063 cDNA, containing additional sequence at the 5′ end. The RECC sequence contains an ORF encoding a predicted protein of 512 amino acids (SEQ ID NO: 1093). This RECC protein shares similarity with mouse cell surface antigen 114/A10. This mouse antigen was found in a hematopoetic progenitor cell line and is described as an intergral membrane protein with serine/threonine repeats at the N-terminus and 3 EGF-like cysteine repeats. It was also detected in a leukemia cell line and IL-3-dependent cell lines (J. Biol. Chem. 1989. 264(11):6509-6514).

[1319] Results from the PSORTII protein analysis program (University of California-Berkeley, Berkeley, Calif.) suggest that RECC is a cell surface protein containing 1 transmembrane domain. PSORTII predicts a cleavable signal peptide from amino acids 1-17, one transmembrane domain, a C-terminal cytoplasmic tail, amino acids 446-512, and a 44.4% likelihood of extracellular localization. The IDENTIFY analysis program (Stanford University, Palo Alto, Calif.) predicts four EGF-type signatures CACVPGY (SEQ ID NO: 1130) and one rhesus blood group protein signature at stringency of one in 106 (no false positives expected).

### Example 8

### Microarray Expression Analysis of cDNAs Encoding Colon Tumor Polypeptides Isolated From a Serological Expression Library

[1320] mRNA expression levels of cDNA clones identified in the serological expression library described in Example 3 were analyzed by microarray as described in Example 1. Those clones with expression levels 2 fold or higher in tumor tissues as compared to normal tissues were further characterized by comparison with the most recent Genbank database. Those sequences that showed some degree of similarity to sequences in the database are summarized in Table 1. Those sequences that showed no significant similarity to known sequences in the database are summarized in Table 2. Disclosed herein are several full length cDNA and predicted amino acid sequences for genes provided in the results of Genbank searches. The full length cDNA sequences are set forth in SEQ ID NOs:1096-1099, 1101, 1103-1106, and 1111-1114, and the full length predicted amino acid sequences are set forth in 1102, 1107-1110, and 1115-1118. The clone, CT2-222, showed the most similarity to a murine gene (disclosed in SEQ ID NOs: 1113 (cDNA) and 1117 (amino acid)). The human homolog of this gene is disclosed in SEQ ID NOs: 1114 (cDNA) and 1118 (amino acid).

TABLE 1
Microarray and Genbank search analysis of cDNAs isolated from a serological expression
library: Sequences that showed some similarity to sequences in Genbank

| | | | | Ratio of Median Values | | | | | | |
|---|---|---|---|---|---|---|---|---|---|---|
| SEQ | | Sequence | | Tumor/Normal Tissue | | | | | | |
| ID NO: | Clone Name | Identifier | GenBank ID | T/N | DA/N | DB/N | DC/N | DD/N | Met* | T/N-C |
| 171, 1096 | CT-53 | 24132 | Galectin-4 (secreted) | 3.2 | 2.4 | 5.4 | 2.1 | 4.5 | | 3.5 |
| 181, 1097 | CT-126 | 25527 | GPI-anch. Surface mark 1 | — | — | 2.3 | — | — | | 2.4 |
| 183, 1098 | CT-140 | 25537 | hAG-2/C (hAG-1)(secreted) | 7.6 | 4.2 | 10.6 | 3.8 | 8.9 | | 9.5 |
| 186, 1099 | CT-148 | 25544 | Glucose Phosp. Isomerase | — | — | 2.1 | — | — | | — |
| | CT2-104 | 41096 | beta IG-H3 (secreted) | 2.4 | 2 | 2.5 | 2.1 | 3.5 | | 2.4 |
| 665, 1111, | CT2-167 | 39819 | Keratin 19 (shed) | 3.4 | — | 3.7 | 2.3 | 3.9 | | 5.2 |
| 1115 | | | | | | | | | | |
| 630 | CSE-2 | 35997 | Unkn (hAG-3) (secreted) | 5.6 | 5.3 | 6 | — | 6.6 | | 5.7 |
| 571, 1103, | CS1-104 | 31409 | Squalene epoxidase | — | — | 2.4 | — | 3.1 | | — |
| 1107 | | | | | | | | | | |
| 573, 574, | CS1-106 | 31364 | Mad p2 | 2.2 | — | 2.4 | — | 3.8 | | 2.2 |
| 1104, 1108 | | | | | | | | | | |
| 578, 1105, | CS1-123 | 31396 | Epith-spec trans fac. ESE-1b | 3.9 | — | 4.4 | 2.4 | 6 | | 8.5 |
| 1109 | | | | | | | | | | |
| 587, 1069, | CS-152 | 32214 | Hu. Regenerating gene type | | | | | | | |
| 1070 | | | IV | | | | | | | |
| 591, 1106, | CS1-160 | 32222 | KSA; adenocarc-assoc Ag | — | — | 2 | — | 3.4 | | 2.7 |
| 1110 | | | | | | | | | | |

| | | | | | |
|---|---|---|---|---|---|
| 675, 1113, | CT2-222 | 39848 | Mu. valosin containing pro.; | 1.24 | **Very low overexpression on 13/38 tumors, and on 5/37 |
| 1117 | | | Hu. homolog | | normals |
| 1101, 1102 | CT2-136; | 41099 | Hu. heat shock protein apg-2 | 1.08 | **Low to high overexpression on all tumors; Moderate OE |
| (161) | (identical | (24115) | | | in N. thymus, low OE in N. lung, panc., b. marrow, |
| | to CT-17) | | | | skel. muscle, skin, aorta, heart, act. PBMC, fetal |
| 1112, 1116, | CT2-147 | 41100 | Hu. Fc fragment of IgG | 1.87 | **Moderate OE in 4, low OE in 8 tumors; low OE in 2, |
| | | | binding protein (FCGBP) | | mod. OE in N. b. marrow, co |
| 172 | PACSINA-6 | (24595) | Hu. PACSIN2 | 1.57 | **Low-moderate OE in 34/37 tumors; Moderate OE in |
| | | | | | N. colon, lung, b. marrow, aorta, skin act. PBMC |

*Met ratio of means
**Clones were picked based upon their low overexpression in normals, not necessariliy due to their levels of overexpression positives.

[1321] TABLE 2
Microarray and Genbank search analysis of cDNAs isolated from a serological expression
library: Sequences that showed no significant similarity to known sequences in Genbank

| | | | | Ratio of Median Values | | | | | | |
|---|---|---|---|---|---|---|---|---|---|---|
| SEQ | | Sequence | | Tumor/Normal Tissue | | | | | | |
| ID NO: | Clone Name | Identifier | GenBank ID | T/N | DA/N | DB/N | DC/N | DD/N | Met* | T/N-C |
| 193, 623, | CT-594 | 27540 | Mus musculus 10 day old male | | | | | | 40 | |
| 1082, 1083 | | | pancreas cDNA (Mouse EST hits: | | | | | | | |
| | | | 113 embryonic, fetal newborn, etc) | | | | | | | |

| | | | | |
|---|---|---|---|---|
| 1100 | CT2-283 | 41103 | 1.59 | **Low OE in 35/37 tumors; low OE in N. colon, b. marrow, |
| | | | | skin, aorta |

*Met ratio of means
**Clones were picked based upon their low overexpression in normals, not necessariliy due to their levels of overexpression positives.

### Example 9

### Northern and Real Time PCR Expression Analysis of the C799P Colon Tumor Antigen

[1322] Searches of the C799P sequence (which relates to Clone Identifier No 14308 and the cDNA sequences disclosed in SEQ ID NOs:40, 132, 684, and 690; and the amino acid sequences disclosed in SEQ ID NOs:686 and 692) were performed against Genbank, human EST and Geneseq databases. A match was found against the 6410 bp NADPH thyroid oxidase 2 (THOX2) mRNA (SEQ ID NO: 1094). An ORF of 1548 amino acids was identified (SEQ ID NO: 1095). PSORTII protein motif prediction analysis suggests the protein contains a cleavable signal peptide and 9 transmembrane domains.

[1323] mRNA expression levels were further analyzed using real-time PCR. Real-time PCR (see Gibson et al., Genome Research 6:995-1001, 1996; Heid et al., Genome Research 6:986-994, 1996) is a technique that evaluates the level of PCR product accumulation during amplification. This technique permits quantitative evaluation of mRNA levels in multiple samples. Briefly, mRNA was extracted from tumor and normal tissue and cDNA was prepared using standard techniques. Real-time PCR was performed using a Perkin Elmer/Applied Biosystems (Foster City, Calif.) 7700 Prism instrument. Matching primers and fluorescent probes were designed for C799P using the primer express program provided by Perkin Elmer/Applied Biosystems (Foster City, Calif.). Optimal concentrations of specific and control (e.g., β-actin) primers and probes were determined. To quantitate the amount of specific RNA in the samples (see Table 3), a standard curve was generated using a plasmid containing C799P. Standard curves were generated using the Ct values determined in the real-time PCR, which are related to the initial cDNA concentration used in the assay. Standard dilutions ranging from 10-10⁶ copies of the gene of interest are generally sufficient. In addition, a standard curve was generated for the control sequence. This permitted standardization of initial RNA content of the tissue samples to the amount of control for comparison purposes. The real-time data showed that C799P is overexpressed in 12 of 31 colon tumor samples when compared to expression seen in normal tissues. Some expression of C799P was observed in normal prostate, lung, pancreas, stomach, salivary gland, thyroid, and esophagus, although expression levels were markedly lower than those seen in colon tumor samples. Overexpression was also observed in lung and ovarian tumor samples. These data indicate that C799P has applicability in diagnostic and/or immunotherapeutic uses.

[1324] Northern analysis confirmed the real-time and earlier microarray data which showed C799P to be overexpressed in colon tumor.

### Example 10

### Full-Length Cloning of C884P Coding Sequence and Expression of C884P-HIS and MAPS-C884P-HIS in HEK293T Cells

[1325] The full-length C884P protein coding sequence was cloned by RT-PCR. Standard RT-PCR was performed to clone the C884P ORF (including the signal sequence) into the TA cloning vector. The mRNA was isolated from a colon tumor, reverse transcribed to cDNA and used as template for PCR. The primers used for the RT-PCR have the following sequence:

C884P-HisTag-AW175 (sense primer) Id = 10468

(SEQ ID NO: 1123)

5′ ggagctagcgccgccATGGCAGGTGTGAGTGCCTG
C884P-HisTag-AW176: (antisense primer) Id = 10469

(SEQ ID NO: 1124)

5′ gccggatccTCAatggtgatggtgatggtgTTTGTTCCCGATCTGGC
AATACAG

Six His residues were built into the 3′ primer (C884P-HisTag-AW176) immediately upstream of the stop codon. The cloned C884P gene was confirmed by DNA sequencing.

[1326] Full-length C884 with a C-terminal His tag was cloned into JA4304 at Nhe I and BamH I sites using standard molecular biology techniques (cDNA and amino acid sequences set forth in SEQ ID NOs: 1120 and 1122-, respectively). Similarly, a fusion construct of MAPS-C884P-CHisTag was also made (cDNA and amino acid sequences set forth in SEQ ID NOs: 1119 and 1121, respectively). Both constructs were confirmed by DNA sequencing.

[1327] Different amounts (0.1 μg, 0.33 μg, 1 μg and 2 μg) of purified plasmids (namely, C884P-C6His, MAPS-C884P-C6His and JA4304 control) were used to transfect HEK293 cells. Cells were harvested 48 h later, and both the supernatant and cell lysate fractions were examined for the expression of C884P-CHisTag or MAPS-C884P-CHisTag proteins by western blots using anti-MAPS antibody and anti-C-terminal His tag antibody. No protein expression was observed by western blots in the supernatant fraction for all three transfections using either anti-MAPS antibody or anti C-terminal Histag antibody. With the anti-MAPS antibody, clean western bands were observed in a concentration dependent manner in the cell lysate transfected with MAPS-C884 fusion construct.

### Example 11

### Full-Length DNA Sequence and Predicted ORFS Identified for Colon Tumor Antigen CT2-283

[1328] The full-length DNA sequence and four protein sequences comprising the most likely open reading frames to be encoded by the DNA sequence for CT2-283 (also referred to as clone ID 41103; partial sequence disclosed in SEQ ID NO:1100) were determined. As described in Example 8, Table 2, this clone was isolated from a serological expression library and was shown to be overexpressed in colon tumors as compared to normal tissues. The full-length DNA sequence is set forth in SEQ ID NO:1125. The 4 predicted ORFs are set forth in SEQ ID NOs: 1126-1129. The full-length sequence was searched against public databases and showed some degree of similarity to the Genbank clone Hu. BAC clone RP11-567018; cDNA: FLJ23117 fis cDNA FLJ13871 fis, clone:RP11-679118.

### Example 12

### Immunogenicity of C884P DNA and MAPS-C884P DNA Fusion Contructs in Mice

[1329] As described in Example 10, MAPS drives the protein expression level of C884P in HEK293 cells. Discloses herein are results showing that MAPS affects the immune response of mice to C884P. In particular, mice immunized with MAPS-C884P DNA gave higher C884P-specific immune response (antibody and CD4) than mice immunized with C884P DNA. Further, FACS analysis with the mice serum showed that C884P is localized to the cell surface of HEK293 transfected with C884P DNA and MAPS-C884P DNA.

[1330] DNA Immunizations:

[1331] C57BL/6 mice were immunized with C884P and MAPS-C884P. C57BL/6 female mice (10 total) were immunized with DNA at 8.5 weeks old. The route of immunization was intramuscular, anterior tibialus with a dose of 100 μg DNA per mouse (50 μl of 1 mg/ml DNA per muscle, 100 μl total per mouse) The immunogens used for the experiment were as follows: C884P DNA (3 mice), MAPS-C884P DNA (3 mice), JA4304 (GSK) vector alone control (4 mice). The mice were given 3 immunizations at approximately 3 week intervals (time 0, May 9, 2001, time 1, May 30, 2001, time 2, Jun. 22, 2001, and time 3 (harvest) Jul. 16, 2001).

[1332] Immune Response of DNA-Vaccinated Mice:

[1333] Antibody response: The IgG1 and IgG2a levels in the mice sera were determined by ELISA method using plates coated with MAPS-C884P protein purified from E. coli expression system. Briefly, MAPS-C884P protein was coated on the 96 well plates ovenight at 4° C. Next day, the plates were washed and blocked with BSA in PBS-T for 1 h at room temperature. After the wash, the mouse serum were added at different dilutions and incubated for 1 h at room temperature. The plates were then washed and HRP-conjugated goat anti-mouse IgG1 or IgG2a was added. After 30 minutes, the plates were washed, developed and read. Two out of three mice immunized with MAPS-C884P gave higher IgG2a. A weaker IgG1 in 1 of 3 mice immunized with C884P was observed.

[1334] CD4 proliferative response: Splenocytes harvested from the spleens of immunized mice were incubated in 96 well plates at 37° C. for 72 hours in the presence of recombinant MAPS-C884P protein. 3×10⁵ T cells were stimulated with dilutions of recombinant E. coli derived MAPS-C884P protein. After the 72 hour incubation, cells were pulsed with tritiated thymidine, incubated for 18 hours, and counted. T cells from MAPS-C884P immunized mice showed greater proliferative responses than T cells from C884P immunized mice and from naïve mice. Stimulations with 0.6 μg of protein showed this pattern most clearly.

[1335] Cytokine response: The INFγ levels in the supernatants of splenocytes stimulated with MAPS-C884P were determined by ELISA assay. 3×10⁶ T cells from each mouse were incubated for 72 hours with 1.2 μg of purified protein. Supernatants were harvested and used in a mouse INFγ assay. The results indicate that T cells from mice immunized with C884P and MAPS-C884P both produce INFγ as compared to T cells from control mice.

[1336] FACS analysis: HEK293 cells were transfected with JA4304, C884P or MAPS-C884P DNA for 2 days. The cells was then washed and stained with different mice sera for 30 min on ice. Following a wash, FITC-conjugated goat anti-mouse IgG antibody was added for 20 min on ice. Finally, the cells were washed, resuspended in staining buffer supplemented with propidium iodide to stain dead cells and analyzed by flow cytometry. The results indicated positive surface staining for HEK293 transfected with either MAPS-C884P and C884P, suggesting that C884P is localized at cell surface.

### Example 13

### Generation of Polyclonal Antibodies Against the RA12-C888P Colon Tumor Antigen

[1337] Production and purification of antigen used for antibody generation: Ra12-C888P was expressed in an E. coli recombinant expression system as described in Example 6. The cDNA sequence encoding the Ra12-C888P fusion protein (R.C888P) is disclosed in SEQ ID NO:1086 and the corresponding predicted amino acid sequence is disclosed in SEQ ID NO:1087. The E. coli expressing Ra12-C888P were grown overnight in LB Broth with the appropriate antibiotics at 37° C. in a shaking incubator. The next morning, 10 ml of the overnight culture was added to 500 ml of 2×YT plus appropriate antibiotics in a 2L-baffled Erlenmeyer flask. When the optical density (at 560 nanometers) of the culture reached 0.4-0.6 the cells were induced with IPTG (1 mM). Four hours after induction with IPTG, the cells were harvested by centrifugation. The cells were then washed with phosphate buffered saline and centrifuged again. The supernatant was discarded and the cells were either frozen for future use or immediately processed.

[1338] Twenty milliliters of lysis buffer was added to the cell pellets and vortexed. To break open the E. coli cells, this mixture was then run through the French Press at a pressure of 16,000 psi. The cells were then centrifuged again and the supernatant and pellet were checked by SDS-PAGE for the partitioning of the recombinant protein. For proteins that localized to the cell pellet, the pellet was resuspended in 10 mM Tris pH 8.0, 1% CHAPS and the inclusion body pellet was washed and centrifuged again. This procedure was repeated twice more. The washed inclusion body pellet was solubilized with either 8 M urea or 6 M guanidine HCl containing 10 mM Tris pH 8.0 plus 10 mM imidazole. The solubilized protein was added to 5 ml of nickel-chelate resin (Qiagen) and incubated for 45 min to 1 hour at room temperature with continuous agitation. After incubation, the resin and protein mixture were poured through a disposable column and the flow through was collected. The column was then washed with 10-20 column volumes of the solubilization buffer. The antigen was then eluted from the column using 8M urea, 10 mM Tris pH 8.0 and 300 mM imidazole and collected in 3 ml fractions. A SDS-PAGE gel was run to determine which fractions to pool for further purification. As a final purification step, a strong anion exchange resin such as Hi-Prep Q (Biorad) was equilibrated with the appropriate buffer and the pooled fractions from above were loaded onto the column. The antigen was eluted off of the column with an increasing salt gradient. Fractions were collected as the column was run and another SDS-PAGE gel was run to determine which fractions from the column to pool. The pooled fractions were dialyzed against 10 mM Tris pH 8.0. This material was then submitted to Quality Control for final release. The release criteria were purity as determined by SDS-PAGE or HPLC, concentration as determined by Lowry assay or Amino Acid Analysis, identity as determined by amino terminal protein sequence, and endotoxin level was determined by the Limulus (LAL) assay. The proteins were then vialed after filtration through a 0.22-micron filter and the antigens were frozen until needed for immunization.

[1339] Generation of polyclonal antisera: 400 micrograms of Ra12C888P antigen was combined with 100 micrograms of muramyldipeptide (MDP). Equal volume of Incomplete Freund's Adjuvant (IFA) was added and then mixed and injected into a rabbit. After four weeks, the rabbit was boosted with 200 micrograms of antigen mixed with an equal volume of IFA. Thereafter the rabbit was boosted I.V. with 100 micrograms of antigen every four weeks. Seven days following each boost the animal was bled. Incubating the blood at 4° C. for 12-24 hours followed by centrifugation generated sera.

[1340] Polyclonal Antibody Purification: The polyclonal anti-sera was loaded onto an Ra12-C888P affinity column. The antigen-specific antibodies were eluted with 0.2M glycine and neutralized. Then these antigen-specific antibodies were loaded on an Ra12 affinity column to remove Ra12 antibody activity. The flow through from this column was collected, concentrated and then characterized by ELISA.

[1341] Characterization of polyclonal antisera: 96 well plates were coated with antigen by incubating with 50 microliters (typically 1 microgram/microliter) at 4° C. for 20 hours. 250 microliters of BSA blocking buffer was added to the wells and incubated at room temperature for 2 hours. Plates were washed 6 times with PBS/0.1% Tween. Rabbit sera and purified rabbit sera were diluted in PBS/0.1% Tween/0.1% BSA. 50 microliters of diluted antibodies were added to each well and incubated at RT for 30 minutes. Plates were washed as described above before 50 microliters of goat anti-rabbit horse radish peroxidase (HRP) at a 1:10000 dilution was added and incubated at RT for 30 minutes. Plates were washed as described above and 100 microliters of TMB Microwell Peroxidase Substrate was added to each well. Following a 15-minute incubation in the dark at room temperature, the colorimetric reaction was stopped with 100 microliters of 1N H₂SO₄ and read immediately at 450 nm. As shown in Table 3, the polyclonal antibody showed immunoreactivity to the Ra12-C888P fusion protein and Ra12 protein. The purified polyclonal antibody also shows immunoreactivity to both proteins but the Ra12 reactivity is considerably lower.

TABLE 3
ELISA results demonstrating antibody reactivity to C888P

| Antigen | | | | | | | | | | | | | |
|---|---|---|---|---|---|---|---|---|---|---|---|---|---|
| on | | | | | | | | | | | | | |
| Plate | Sera Sample | | | | | | | | | | | | |
| | | Antibody Dilutions | | | | | | | | | | | |
| | | 1:1000 | 1:2000 | 1:4000 | 1:8000 | 1:16000 | 1:32000 | 1:64000 | 1:128000 | 1:256000 | 1:512000 | 1:1024000 | 0 |
| RC888P | Preimmune sera | 0.09 | 0.06 | 0.06 | 0.06 | 0.06 | 0.06 | 0.06 | 0.06 | 0.06 | 0.06 | 0.06 | 0.06 |
| | | 0.06 | 0.05 | 0.05 | 0.06 | 0.05 | 0.05 | 0.05 | 0.06 | 0.06 | 0.05 | 0.06 | 0.06 |
| | Average | 0.07 | 0.06 | 0.06 | 0.06 | 0.06 | 0.06 | 0.06 | 0.06 | 0.06 | 0.06 | 0.06 | 0.06 |
| | anti-RC888P poly | 1.86 | 1.81 | 1.73 | 1.55 | 1.25 | 0.98 | 0.61 | 0.37 | 0.23 | 0.14 | 0.09 | 0.06 |
| | (6408L): | | | | | | | | | | | | |
| | | 2.00 | 1.77 | 1.67 | 1.55 | 1.22 | 0.90 | 0.61 | 0.33 | 0.23 | 0.12 | 0.10 | 0.06 |
| | Average | 1.93 | 1.79 | 1.70 | 1.55 | 1.24 | 0.94 | 0.61 | 0.35 | 0.23 | 0.13 | 0.09 | 0.06 |
| | | Purified Antibody Concentration (μg/ml) | | | | | | | | | | | |
| | | 1.0 | 0.50 | 0.25 | 0.13 | 0.063 | 0.031 | 0.016 | 0.0078 | 0.0039 | 0.0020 | 0.0010 | 0 |
| | affi-pure, | 1.83 | 1.55 | 1.33 | 1.01 | 0.61 | 0.37 | 0.21 | 0.11 | 0.09 | 0.07 | 0.06 | 0.06 |
| | Ra12-free | | | | | | | | | | | | |
| | anti-RC888P poly | | | | | | | | | | | | |
| | | 1.80 | 1.56 | .134 | 0.99 | 0.67 | 0.39 | 0.22 | 0.12 | 0.09 | 0.06 | 0.06 | 0.09 |
| | Average | 1.81 | 1.55 | 1.33 | 1.00 | 0.64 | 0.38 | 0.21 | 0.12 | 0.09 | 0.06 | 0.06 | 0.08 |
| | | Antibody Dilutions | | | | | | | | | | | |
| | | 1:1000 | 1:2000 | 1:4000 | 1:8000 | 1:16000 | 1:32000 | 1:64000 | 1:128000 | 1:256000 | 1:512000 | 1:1024000 | 0 |
| Ra12 | Preimmune sera | 0.18 | 0.15 | 0.15 | 0.15 | 0.15 | 0.14 | 0.14 | 0.15 | 0.15 | 0.16 | 0.16 | 0.13 |
| | | 0.18 | 0.17 | 0.15 | 0.15 | 0.14 | 0.13 | 0.13 | 0.14 | 0.15 | 0.16 | 0.16 | 0.09 |
| | Average | 0.18 | 0.16 | 0.15 | 0.15 | 0.15 | 0.14 | 0.13 | 0.14 | 0.15 | 0.16 | 0.16 | 0.11 |
| | anti-RC888P poly | 1.84 | 1.83 | 1.66 | 1.38 | 1.05 | 0.66 | 0.44 | 0.31 | 0.22 | 0.21 | 0.19 | 0.16 |
| | (6408L): | | | | | | | | | | | | |
| | | 1.98 | 1.79 | 1.62 | 1.36 | 1.02 | 0.67 | 0.41 | 0.31 | 0.26 | 0.19 | 0.20 | 0.18 |
| | Average | 1.91 | 1.81 | 1.64 | 1.37 | 1.03 | 0.67 | 0.42 | 0.31 | 0.24 | 0.20 | 0.20 | 0.17 |
| | | Purified Antibody Concentration (μg/ml) | | | | | | | | | | | |
| | | 1.0 | 0.50 | 0.25 | 0.13 | 0.063 | 0.031 | 0.016 | 0.0078 | 0.0039 | 0.0020 | 0.0010 | 0 |
| | affi-pure, | 0.45 | 0.31 | 0.21 | 0.18 | 0.16 | 0.12 | 0.13 | 0.14 | 0.17 | 0.16 | 0.18 | 0.16 |
| | Ra12-free | | | | | | | | | | | | |
| | anti-RC888P poly | | | | | | | | | | | | |
| | | 0.48 | 0.33 | 0.22 | 0.19 | 0.18 | 0.12 | 0.12 | 0.12 | 0.15 | 0.14 | 0.14 | 0.14 |
| | Average | 0.47 | 0.32 | 0.21 | 0.18 | 0.17 | 0.12 | 0.13 | 0.13 | 0.16 | 0.15 | 0.16 | 0.15 |

### Example 14

### Analysis of C888P Tissue Expression by Immunohistochemistry (1HC)

[1342] To determine if C888P (SEQ ID NO:1076) was specifically expressed in colon cancer as compared to normal colon tissue, immunohistochemistry (IHC) analysis was performed on a normal colon and colon cancer tissue sections. Tissue samples were fixed in formalin solution for 12-24 hrs and embedded in paraffin before being sliced into 8 micron sections. Steam heat induced epitope retrieval (SHIER) in 0.1 M sodium citrate buffer (pH 6.0) was used for optimal staining conditions. Sections were incubated with 10% serum/PBS for 5 minutes. Primary antibody was added to each section for 25 minutes followed by 25 minute incubation with anti-rabbit biotinylated antibody. Endogenous peroxidase activity was blocked by three 1.5 minute incubations with hydrogen peroxidase. The avidin biotin complex/horse radish peroxidase (ABC/HRP)-system was used along with DAB chromogen to visualize antigen expression. Slides were counterstained with hematoxylin to visualize cell nuclei.

[1343] IHC analysis indicated that the antibodies generated against C888P as described in Example 13 are immunoreactive with colon cancer tissue. IHC staining indicated that expression of C888P is plasma membrane associated in both colon cancer and normal colon tissue. However, staining patterns between normal colon and colon tumor tissue are distinct. In normal colon tissue, expression of C888P is localized to the epithelial cell population. However, in colon cancer tissue, the anti-C888P staining indicated a uniform expression across the cancerous tissue. Thus, these antibodies can be used in IHC to differentiate normal colon from colon cancer tissue.

[1344] C888P expression was further analyzed in a variety of tissues including colon cancer sections and normal tissues. This analysis confirmed C888P positive membrane staining in 7 of 7 colon cancer samples. Positive membrane staining was also observed in normal colon, sigmoid colon, duodenum, ileum, appendix, and gallbladder. Marginal staining was seen in normal salivary gland and stomach. The following normal tissues were all negative for C888P staining: nasal mucosa, liver, heart, lung, esophagus, pancreas, antrum of stomach, seminal vesicle, testis, epidydimis, thyroid, breast, endometrium-proliferation, endometrium-secretory, myometrium, kidney, adrenal medulla, spleen, skeletal muscle, brain-white and gray matter, and spinal cord.

[1345] Thus IHC analysis confirms the expression of C888P in colon cancer and normal colon tissues as compared to a variety of other normal tissues and further validates this antigen as a marker for colon cancer.

### Example 15

### MRNA Expression Analysis of the C888P Colon Tumor Antigen Using Real Time PCR

[1346] The mRNA expression profile of C888P (full-length cDNA set forth in SEQ ID NO:1076, partial sequence set forth in SEQ ID NO:21, also referred to as L1-Cadherin) was analyzed by real-time PCR as described in Example 9. Real-time PCR results showed overexpression of C888P in over 90% of colon tumors and in normal colon. Some expression was also observed in normal small intestine but no expression was observed in any other normal tissue examined (kidney, spleen, heart, aorta, pancreas, stomach, skin, breast, thymus, bone, skeletal muscle, trachea, bronchus, cartilage, pituitary, retina, cerebellum, ureter, spinal cord, brain, bladder, esophagus, liver, activated PBMC, rested PBMC, lung, adrenal gland, salivary gland, bone marrow, thyroid). These data confirm microarray results that showed colon-specific expression of C888P. C888P mRNA expression was also analyzed in matched pair (normal versus tumor) tissues. These results confirm expression of C888P in normal colon and colon tumor tissues. Real-time PCR also showed increased expression of C888P in diverticulous tissues as compared to normal tissue.

### Example 16

### Synthesis of Polypeptides

[1347] Polypeptides may be synthesized on a Perkin Elmer/Applied Biosystems Division 430A peptide synthesizer using FMOC chemistry with HPTU (O-Benzotriazole-N,N,N′,N′-tetramethyluronium hexafluorophosphate) activation. A Gly-Cys-Gly sequence may be attached to the amino terminus of the peptide to provide a method of conjugation, binding to an immobilized surface, or labeling of the peptide. Cleavage of the peptides from the solid support may be carried out using the following cleavage mixture: trifluoroacetic acid:ethanedithiol:thioanisole:water:phenol (40:1:2:2:3). After cleaving for 2 hours, the peptides may be precipitated in cold methyl-t-butyl-ether. The peptide pellets may then be dissolved in water containing 0.1% trifluoroacetic acid (TFA) and lyophilized prior to purification by C18 reverse phase HPLC. A gradient of 0%-60% acetonitrile (containing 0.1% TFA) in water (containing 0.1% TFA) may be used to elute the peptides. Following lyophilization of the pure fractions, the peptides may be characterized using electrospray or other types of mass spectrometry and by amino acid analysis.

[1348] All of the above U.S. patents, U.S. patent application publications, U.S. patent applications, foreign patents, foreign patent applications and non-patent publications referred to in this specification and/or listed in the Application Data Sheet, are incorporated herein by reference, in their entirety.

[1349] From the foregoing it will be appreciated that, although specific embodiments of the invention have been described herein for purposes of illustration, various modifications may be made without deviating from the spirit and scope of the invention. Accordingly, the invention is not limited except as by the appended claims.

1. An isolated polynucleotide comprising a sequence selected from the group consisting of:
(a) sequences provided in SEQ ID NOs:1-121, 123-197, 205-630, 632-684, 686, 690-691, 694-1058, 1069, 1071-1076, 1082, 1084, 1086, 1092, 1094, 1096-1101, 1103-1106, 1111-1114, 1119, 1120, and 1125;
(b) complements of the sequences provided in SEQ ID NOs:1-121, 123-197, 205-630, 632-684, 686, 690-691, 694-1058, 1069, 1071-1076, 1082, 1084, 1086, 1092, 1094, 1096-1101, 1103-1106, 1111-1114, 1119, 1120, and 1125;
(c) sequences consisting of at least 20 contiguous residues of a sequence provided in SEQ ID NOs:1-121, 123-197, 205-630, 632-684, 686, 690-691, 694-1058, 1069, 1071-1076, 1082, 1084, 1086, 1092, 1094, 1096-1101, 1103-1106, 1111-1114, 1119, 1120, and 1125;
(d) sequences that hybridize to a sequence provided in SEQ ID NOs:1-121, 123-197, 205-630, 632-684, 686, 690-691, 694-1058, 1069, 1071-1076, 1082, 1084, 1086, 1092, 1094, 1096-1101, 1103-1106, 1111-1114, 1119, 1120, and 1125, under moderately stringent conditions;
(e) sequences having at least 75% identity to a sequence of SEQ ID NOs:1-121, 123-197, 205-630, 632-684, 686, 690-691, 694-1058, 1069, 1071-1076, 1082, 1084, 1086, 1092, 1094, 1096-1101, 1103-1106, 1111-1114, 1119, 1120, and 1125;
(f) sequences having at least 90% identity to a sequence of SEQ ID NOs:1-121, 123-197, 205-630, 632-684, 686, 690-691, 694-1058, 1069, 1071-1076, 1082, 1084, 1086, 1092, 1094, 1096-1101, 1103-1106, 1111-1114, 1119, 1120, and 1125; and
(g) degenerate variants of a sequence provided in SEQ ID NOs:1-121, 123-197, 205-630, 632-684, 686, 690-691, 694-1058, 1069, 1071-1076, 1082, 1084, 1086, 1092, 1094, 1096-1101, 1103-1106, 1111-1114, 1119, 1120, and 1125.

2. An isolated polypeptide comprising an amino acid sequence selected from the group consisting of:
(a) sequences encoded by a polynucleotide of claim 1;
(b) sequences having at least 70% identity to a sequence encoded by a polynucleotide of claim 1;
(c) sequences having at least 90% identity to a sequence encoded by a polynucleotide of claim 1;
(d) sequences set forth in SEQ ID NOs:122, 198-204, 631, 685, 687, 692, 693, 1059-1068, 1070, 1077-1081, 1083, 1085, 1087, 1093, 1095, 1102, 1107-1110, 1115-1118, 1121, 1122, and 1126-1129;
(e) sequences having at least 70% identity to a sequence set forth in SEQ ID NOs:122, 198-204, 631, 685, 687, 692, 693, 1059-1068, 1070, 1077-1081, 1083, 1085, 1087, 1093, 1095, 1102, 1107-1110, 1115-1118, 1121, 1122, and 1126-1129; and
(f) sequences having at least 90% identity to a sequence set forth in SEQ ID NOs:122, 198-204, 631, 685, 687, 692, 693, 1059-1068, 1070, 1077-1081, 1083, 1085, 1087, 1093, 1095, 1102, 1107-1110, 1115-1118, 1121, 1122, and 1126-1129.

3. An expression vector comprising a polynucleotide of claim 1 operably linked to an expression control sequence.

4. A host cell transformed or transfected with an expression vector according to claim 3.

5. An isolated antibody, or antigen-binding fragment thereof, that specifically binds to a polypeptide of claim 2.

6. A method for detecting the presence of a cancer in a patient, comprising the steps of:
(a) obtaining a biological sample from the patient;
(b) contacting the biological sample with a binding agent that binds to a polypeptide of claim 2;
(c) detecting in the sample an amount of polypeptide that binds to the binding agent; and
(d) comparing the amount of polypeptide to a predetermined cut-off value and therefrom determining the presence of a cancer in the patient.

7. A fusion protein comprising at least one polypeptide according to claim 2.

8. An oligonucleotide that hybridizes to a sequence recited in SEQ ID NOs:1-121, 123-197, 205-630, 632-684, 686, 690-691, 694-1058, 1069, 1071-1076, 1082, 1084, 1086, 1092, 1094, 1096-1101, 1103-1106, 1111-1114, 1119, 1120, and 1125, under moderately stringent conditions.

9. A method for stimulating and/or expanding T cells specific for a tumor protein, comprising contacting T cells with at least one component selected from the group consisting of:
(a) polypeptides according to claim 2;
(b) polynucleotides according to claim 1; and
(c) antigen-presenting cells that express a polynucleotide according to claim 1,
under conditions and for a time sufficient to permit the stimulation and/or expansion of T cells.

10. An isolated T cell population, comprising T cells prepared according to the method of claim 9.

11. A composition comprising a first component selected from the group consisting of physiologically acceptable carriers and immunostimulants, and a second component selected from the group consisting of:
(a) polypeptides according to claim 2;
(b) polynucleotides according to claim 1;
(c) antibodies according to claim 5;
(d) fusion proteins according to claim 7;
(e) T cell populations according to claim 10; and
(f) antigen presenting cells that express a polypeptide according to claim 2.

12. A method for stimulating an immune response in a patient, comprising administering to the patient a composition of claim 11.

13. A method for the treatment of a cancer in a patient, comprising administering to the patient a composition of claim 11.

14. A method for determining the presence of a cancer in a patient, comprising the steps of:
(a) obtaining a biological sample from the patient;
(b) contacting the biological sample with an oligonucleotide according to claim 8;
(c) detecting in the sample an amount of a polynucleotide that hybridizes to the oligonucleotide; and
(d) compare the amount of polynucleotide that hybridizes to the oligonucleotide to a predetermined cut-off value, and therefrom determining the presence of the cancer in the patient.

15. A diagnostic kit comprising at least one oligonucleotide according to claim 8.

16. A diagnostic kit comprising at least one antibody according to claim 5 and a detection reagent, wherein the detection reagent comprises a reporter group.

17. A method for inhibiting the development of a cancer in a patient, comprising the steps of:
(a) incubating CD4+ and/or CD8+ T cells isolated from a patient with at least one component selected from the group consisting of: (i) polypeptides according to claim 2; (ii) polynucleotides according to claim 1; and (iii) antigen presenting cells that express a polypeptide of claim 2, such that T cell proliferate;
(b) administering to the patient an effective amount of the proliferated T cells,
and thereby inhibiting the development of a cancer in the patient.

The application's sequence listing, which the Patent Office published only in electronic form, follows.

SEQUENCE LISTING (1130 sequences)

SEQ ID NO: 1 - DNA, 458 bp, Homo sapiens
  misc_feature 1: n = A,T,C or G
ncaggtctggcggcacctgtgcactcagccgtcgatacactggtcgattgggacagggaagacgatgtggttttcagggaggcccagagatttggagaagcggatgaagttctcctttagttccgaagtcagctccttggttctcccgtagagggtgatcttgaagtactccctgttttgagaaactttcttgaagaacaccatagcatgctggttgtagttggtgctcaccactcggacgaggtaactcgttaatccagggtaactcttaatgttgcccagcgtgaactcgccgggctggcaacctggaacaaaagtcctgatccagtagtcacacttctttttcctaaacaggacggaggtgacattgtagctcttgtcttctttcagctcatagatggtggcatacatcttttgcgggtctttgtcttctctgagaattgcattccctgccagga

SEQ ID NO: 2 - DNA, 423 bp, Homo sapiens
cagggtccataggtgatccgcaactctcgagcatttatatacaatagcaaatcatccagtgtgttgtacagtctataatactccaacagtctcccatctgtattcaatggcgccacccaatacagtcctttgtttggatgctggggagagtaatccctaccccaagcaccatatagataagaaaaccctctccagttgagctgaaccacagacggtttgctgatgttcaccacaccaccatgaccacagctccctggagtgggaggagggtggacgacaggggtgttttgatctttagaggcttcacactctttcagcttggtcttcagagccacgatttctcggcgaatggcaaggacattgtttttgtctagtgtctcaagcttctctaccaagagagtcatatttcttatctccacctcc

SEQ ID NO: 3 - DNA, 538 bp, Homo sapiens
ggtctgtccaatggcaacaggaccctcactctaytcartgtcacaagraatgayrcagsamsctayraatgtgaaayccagaacccagtgagtgccarscgcagtgayycagtcatcctgaatgtcctctatggcccrgatgmccccaccatttcccctctaaacacatmttaccgwycaggggaaaatctgaacctctcctgccacgcagcctctaacccacctgcacagtactcttggtttrtcaatgggactttccagcaatccacmcaagagctctttatccccaacatcactgtgaataatagyggatcctatacgtgccaagcccataactcagmcactggcctcaataggaccacagtcacgacgatcacagtctatgcaagagccacccaaacccttcatcaccagcaacaactccaaccccgtggaggatgaggatgctgtagccttaacctgtgaacctgagattcagaacacaacctacctgtggtgggtaaataatcagagcctcccggtcagtcccaggctgcag

SEQ ID NO: 4 - DNA, 309 bp, Homo sapiens
tggtaasccaaaaagatgctggggcagattgtggacaagtagaagaacctccttcccctctgcgaacattgaacggcgtggattcaatagtgagcttggcagtggtgggcgggttccagaaggttagaagtgaggctgtgagcaggagcccctgccaggggatvcacgcamtctgtggggaggggctgagrggdgwcyccatggtctctgctgtctgctctgtcctcctctgtggagaagagcttgagctccaggaacgctttgrtcavggctgcctgtgacctytgctctgbtctgcctgcccgggcg

SEQ ID NO: 5 - DNA, 412 bp, Homo sapiens
gtccaatggcaacaggacccctcacttctattcaatgtcacaagaaatgacgcaagagcctatgtatgtggaatccagaactkcagtgagtgcaaaccgcagtgacccagtcaccctggatgtcctctatgggccagacascccccatcatttcccccccagactcgtcttacctttcgggagcgaacctcaacctctcctgccactcggcctctaacccatccccgcagtattcttggckgtatcaatgggataccgcagcaacacacacaagttctctttatcgccaaaatcacgccaaataataacgggacctatgcctgttttgtctctaacttggctactggcccgcaataattccatagtcaagagcatcacagtcttctgcatctggaacttctcctggtcttct

SEQ ID NO: 6 - DNA, 332 bp, Homo sapiens
gtgcaagggctttacaaaaactgtgccagtkrcttctycatgwsrcwrgatctgacttkattsaygttktatgagsysyasaatmctgawgctcmttytssakgrwsttckgsatmrgcagtsrattcsacatttgggrtakrtymtctctsgaagysamtgtcakgcagtgrcayccwrgkktcwgcwtgcwgtgrgttamcakcmwtrywtagkgsgmayatratttaramrgtayakcymtctcmctcytycmccaywtgcwcaassmkcacacctcggccgcgaccacgctaagcccgaattccagcacactggcggccgttactagt

SEQ ID NO: 7 - DNA, 401 bp, Homo sapiens
tggtgttgttggcgccagttccctggacctggaacagccgtgtggagggcccggtctccaagttgttagttcgggaggtgcctccctggtagaccaccatgcgtcccttgaagatggacataagatgaggtggctccttgcccattgggacccggatctggactggttcaccattgtacttctggtccaggatgacggcttgataagctgatgctgtaatttcatcttggctggcctggctgccctgccaaacgtagagcaggtaatgctgcttctcgccgatgaaggtaggtgtaagagcagcaggtaagcaagttcgcccccatagaagtgggcctagccacttggaattccagcacactggcggcccgttactagtgggatcccgagctcggtaccaa

SEQ ID NO: 8 - DNA, 1151 bp, Homo sapiens
ctctctccataaaactcagcactttacagatgtagaatatataagcatgccaaatttacttatctgccacatacaaagcatcattccaggtgctagtgaggggaaaaaaaagttggagatttggtccctcgaggagctccagatattaatctacctaactaagtccccaggtttcttccaggcatggaagaattagtggtgctacatggatgaggactagtcattgggcaatatttcctgtacaaagaatccctagacgccatactgagttttaagttccttaattcctaatttaaggcttctagtgaagcctcctcacagtaggcttcactaggcccacagtgcccctagacctctgacaatcccaccctagacagactttattgcaaaatgcgcctgaagaggcagatgattcccaagagaactcaccaaatcaagacaaatgtcctagatctctagtgtggtagaactatgcacctaaacattgctgcaaaatgaacacacttttagacacccctgcagatatctaagtaagtggagaagactattttttcaacaaacattttctctttcaccctaactcctaaacagcttactggggcttctgcaagacagaaagatcataattcagaaggtaaccatcgttatagacataaagtttctggtcaaaagggttatagttaatgctctgcactttttcctgcatcttatgcattacaatgtctagtttgccctctttccctgtgtttgtgtcataatagtaaaaaatctcttctgttctggtgtttcatagtacgggtggcatacagaaccccacataccatgaaggcgttagaagcagatggtttatactgcttggtataccaagtgtttagcacctgaagtgtggtgtcattgagtttactaatcaccatgttaccagtgctggcttcagttgaataaataacccacaatccattctcatccacagcaaagtcaatatcttgccaagcaacattagcatatgaaaagcggttattataggcagcattagggagagtttgagtcacagcaatcgtgttggtggtcaggttaactctggcaatattcccggtgttgtacatgttgacgtacatgttgttgttgtaaactgctgtaccactaccttggac

SEQ ID NO: 9 - DNA, 604 bp, Homo sapiens
  misc_feature 410, 427: n = A,T,C or G
ctgtgcaagggctttacaaaaactgtgccaggacttcccatgaggctggattgcttgattcatgttttatgagccccacaatactgaagctccttttccagggacttggcataggcagtcaattccacatttgggataggtcctctctggaagtgaatgtcaggcagtgacatccaagtttctgcatgcagtgggttaacagccatgtttagggggaacatgatttaaaaagtacatctctctccctcctcccccacatgcacaaggctcacatctcattatggtgkcggcccatgtcacattaaagtgtgatacttkggttttgaaaacattcaaacagtctctgtggaaatctggagagaaattggcggagagctgccgtggtgcattcctcctgtagtgcttcaagntaatgcttcatcctttnttaataacttttgatagacaggggctagtcgcacagacctctgggaagccctggaaaacgctgatgcttgtttgaagatctcaagcgcagagtctgcaagttcatcccctctttcctgaggtctgttggctggaggctgcagaacattggtgatgacatggaccacgccatttgtgg

SEQ ID NO: 10 - DNA, 473 bp, Homo sapiens
tcgagaagatccctagtgagactttgaaccgtatcctgggcgacccagaagccctgagagacctgctgaacaaccacatcttgaagtcagctatgtgtgctgaagccatcgttgcggggctgtctgtggagaccctggagggcacgacactggaggtgggctgcagcggggacatgctcactatcaacgggaaggcgatcatctccaataaagacatcctagccaccaacggggtgatccactacattgatgagctactcatcccagactcagccaagacactatttgaattggctgcagagtctgatgtgtccacagccattgaccttttcagacaagccggcctcggcaatcatctctctggaagtgagcggttgaccctcctgggctcccctgaattctgtattcaaagatggaacccctccaattgatgcccatacaaggaatttgcttcggaaccacataattaaaga

SEQ ID NO: 11 - DNA, 411 bp, Homo sapiens
  misc_feature 251, 276, 406, 409: n = A,T,C or G
tcctcattggtcggggccaaaagcgtgtactggccgttaccttcaagcatcgtgttgagccctgatgcagccacagcagcccgaagggtctcaaaggtgtcctcgatctcaatgatctgctggatgttgttggtgatggtggagatgaccttatcgatgaggtgcaccaccccgttggttgcatggtggtcggctttyarcarccgggcacagttcacagttacaatcccattaggatagtggtggatctnggatgttggaattctggtacatagnaggtgaggggtcatgcccgtgtttcagctcatcagtcaggactcgcctgcccaccatatggtaagcsgragggcatttgagcagctcaatgtttgacattgctggaccaggggagttccagcacttctanganga

SEQ ID NO: 12 - DNA, 560 bp, Homo sapiens
tacttgcctggagatwgcyttykckwtmtgytcwrawgtccgtggatacagaaatctctgcaggcaagttgctccagagcatattgcaggacaagcctgtaacgaatagttaaattcacggcatctggattcctaatccttttccgaaatggcaggtgtgagtgcctgtataaaatattctatgtttaccttcaacttcttgttctggctatgtggtatcttgatcctagcattagcaatatgggtacgagtaagcaatgactctcaagcaatttttggttctgaagatgtaggctctagctcctacgttgctgtggacatattgattgctgtaggtgccatcatcatgattctgggcttcctgggatgctgcggtgctataaaagaaagtcgctgcatgcttctgttgtttttcataggcttgcttctgatcctgctcctgcaggtgggcgacaggtatcctaggagctgttttcaaatctaagtctgatcgcattgtgaatgaaactctctatgaaaacacaaagcttttgagcgccacaggggaaagtgaaaaacaa

SEQ ID NO: 13 - DNA, 150 bp, Homo sapiens
gggcaggctgtctttttaaaatgtctcggctagctagaccacagatatcttctagacatattgaacacatttaagatttgagggatataagggaaaatgatatgaatgtgtatttttactcaaaataaaagtaactgtttacgttggtga

SEQ ID NO: 14 - DNA, 403 bp, Homo sapiens
ctgctgcctgtggcgtgtgtgggctggatcccttgaaggctgagtttttgagggcagaaagctagctatgggtagccaggtgttacaaaggtgctgctccttctccaacccctacttggtttccctcaccccaagcctcatgttcataccagccagtgggttcagcagaacgcatgacaccttatcacctccctccttgggtgagctctgaacaccagctttggcccctccacagtaaggctgctacatcaggggcaaccctggctctatcattttccttttttgccaaaaggaccagtagcataggtgagccctgagcactaaaaggaggggtccctgaagctttcccactatagtgtggagttctgtccctgaggtgggtacagcagccttggttcctctg

SEQ ID NO: 15 - DNA, 688 bp, Homo sapiens
  misc_feature 638, 639, 649, 660, 666, 669, 671, 673, 674, 679, 684: n = A,T,C or G
caaagcacattttaatcatttattttaaaagggggagtaaagcatttaaactgccaatcctatagactaggacttgaacatcaaaggaaaaatagacaaagactagatgataaagtcattcaaaagcacagaagcacatcacatacaccagcaaggtttccaactactgcactgattaactagatactctcaatagcttttctatagctcgtcctagaaaaaaaaattaaattttcattttcttacaagttccaggcttaaacaaaggcaaaaattacatgcaacaactgatacactcataagttgcacatatgctccaaggtctttattagataacaataaatgctagcactttgtcactgccatcagattttccttatagtcttagagtcatgtaaataaaagttccataatgaaattaaagaaaattaatttttctaatcttagatcagttccatagaaaactattaatttttttaaagtaggcagtagaagggggttggtggggggtggaattggttagtaagtctggttctaatcttctgagctgcctttggaaggaagttatgaggtagaagattctactgacttttagtaaggtggacaatgagagaaaagaaaaagcaggtgcctcatcnncagatccttntggtatttatntgccangtncnanntaatncatanaaag

SEQ ID NO: 16 - DNA, 408 bp, Homo sapiens
caggtcatcaagatgacttacaggatgtaatagggagagctgtcgagattggtgttaaaaagtttatgattacaggtggaaatctacaagacagtaaagatgcactgcatttggcacaaacaaatggtatgtttttcagtacagttggatgtcgtcctacaagatgtggtgaatttgaaaagaataaccctgatctttacttaaaggagttgctaaatcttgctgaaaacaataaagggaaagttgtggcaataggagaatgcggacttgattttgacccgactgcagttttgtcccaaagatactcaactcaaatattttgaaaaacagtttgaactgtcagaacaaacaaaattaccaatgtttcttcattgtccgaaactcacatgctgaatttttggacataat

SEQ ID NO: 17 - DNA, 407 bp, Homo sapiens
ggtcctggggaggccctaggggagcaccgtgatggagaggacagagcaggggctccagcaccttctttctggactggcgttcacctccctgctcagtgcttgggctccacgggcaggggtcagagcactccctaatttatgtgctatataaatatgtcagatgtacatagagatctattttttctaaaacattcccctycccactcctctcccacagagtgctggactgttccaggccctccagtgggctgatgctgggacccttaggatggggctcccagctcctttctcctgtgaatggaggcagaagacctccaataaagtgccttctgggctttttctaacctttgtcttagctacctgtgtactgaaatttgggcctttggatcgaatatggtcaagaggtt

SEQ ID NO: 18 - DNA, 405 bp, Homo sapiens
tgaagagtcaacttgggcctggaggactgataaagtttgtgattttgagggcctctaaaagtattaaagcagcggcagccgctgcacgcagacatgagggctaggttaaaacagtaagatcaagttgtttggacagaaaggctacagagtgtggtcctggctcttgtgtaagaattacgaccacgctaaccatgcctaggaaggaaaggagttattgttttgtagaaaggtgctggggtttgagagatcagtcggacacgattggcagggagagcacgtgtgtttttatgagaattatgcccgagataggtaacagatgaggaagaaatttgggcttgattgaagtaatgggggctgtctgtgaagctttgcagcagtacagcctaggtaatttgctgagcctaa

SEQ ID NO: 19 - DNA, 401 bp, Homo sapiens
tcctgacattcctgccttcttatattaataagacaaataaaacaaaatagtgttgaagtgttggggcagcgaaaatttttggggggtggtatggagagataatgggcgatgtttctcagggctgcttcaagcgggattaggggcggcgtgggagcctagagtgggagagattaagctgaagggaggtcttgtggtaaggggtgatatcatggggatgttagaagaaacatttgtcgtatagaatgattggtgatggcctggatacggttttggatgatttgagaagctaaatggaagatacaaggtccgaataaaaggaggagaaaaatgggtattaaatgtctaagaattgggaggacctaggacatctgattagagagtgcctaaggagattcagcata

SEQ ID NO: 20 - DNA, 331 bp, Homo sapiens
aggtccagctctgtctcatacttgactctaaagtcatcagcagcaagacgggcattgtcaatctgcagaacgatgcgggcattgtccacagtatttgcgaagatctgagccctcaggtcctcgatgatcttgaagtaatggctccagtctctgacctggggtcccttcttctccaagtgctcccggattttgctctccagcctccggttctcggtctccaggctcctcactctgtccaggtaagaggccaggcggtcgttcaggctttgcatggtctccttctcgttctggatgcctcccattcctgccagacccccggctatcccggtgg

SEQ ID NO: 21 - DNA, 346 bp, Homo sapiens
  misc_feature 257: n = A,T,C or G
ggtccaccacttgtacccgatatggacttccggcttctctgtccaatggagccacactaaagatctcaccagtcacgtggtcaattttaagccaacctcttgtgtctcccctcagtgaatagcttatgtccagaccttctggatccttggcagtcacattgcccactttagtgcctatagctacatcctcactgactttcgcttggaatacgtgttgggaaaattgaggtgcttcattcacatctgtcacaataagncgtgaacttggcaaaagaacttgcattgtacttcacaccaaacactagaggctcaggattttctgctttgaacacaatgttggaaacag

SEQ ID NO: 22 - DNA, 360 bp, Homo sapiens
  misc_feature 317: n = A,T,C or G
gaagactccctctctcggaagccggatcccgagccgggcaggatggatcaccaccagccggggactgggcgctaccaggtgcttcttaatgaagaggataactcagaatcatcggctatagagcagccacctacttcaaacccagcacccgcagattgtgcaggctgcgtcttcagcaccagcacttgaaactgactcttcccctccaccatatagtagtattactggtggaagtacctacaacttcagatacagaagtttacggtgagttttatcccgtgccacctccctatagcgttgctacctctcttcctacnwtacgatgaaagctgagaaggctaaagctgctgcaatggcatg

SEQ ID NO: 23 - DNA, 251 bp, Homo sapiens
ggcggagctccacgacgagctggaaaaggaaccttttgaggatggctttgcaaatggggaagaaagtactccaaccagagatgctgtggtcacgtatactgcagaaagtaaaggagtcgtgaagtttggctggatcaagggtgtattagtacgttgtatgttaaacatttggggtgtgatgcttttcattagattgtcatggattgtgggtcaagctggaataggtctatcagtccttgtaataatgatgg

SEQ ID NO: 24 - DNA, 421 bp, Homo sapiens
  misc_feature 182: n = A,T,C or G
caggtctttcccaggtgttgactccagctccagcttcagctccagctccaggtcgggctccagctccagccgcagcttargcagcgggaggttctgtgtcccagttgttttccaatttcaccggctcccgtggatgamcgygggacctgycaswgctcctgtktycctgcyagsacaccacnytttyccgtggacacrarkggaacckcttggaattcacagctyatgttctttctcaraagtttgagaaagaactttctaaagtgagggaatatgtccaattaattagtgtgtatgaaaagaaactgttaaacctaactgtccgaattgacatcatggaraaaggataccatttcttacactgaactggacttcgagctgatcaaggtagaagtgaaggagatggaaaaactggtcatac

SEQ ID NO: 25 - DNA, 381 bp, Homo sapiens
  misc_feature 81, 146, 291, 355: n = A,T,C or G
gaactttttgtttctttattttcaatatttgtcttattaatatttttcttattttataatgcaattacaacaatttagganacaaaacaatataaacaaaagaatgttaaatagttttttttaaaaaatagcttgttgcttgcaanaaagtccatataatcttattcccccccaaatataattttatactttgcactaaaccaaaatagcttatggaaaattagtattaaatagctaaacacagaaaacctacagctataaataacataaaatacagtttaactttaatgngatgcttaaacaaagcaaactatgatgcaatatgaatcaacttcattaattggacaagtccagnggaggcacaaattagataagcactaa

SEQ ID NO: 26 - DNA, 401 bp, Homo sapiens
  misc_feature 219, 236, 276, 300, 303, 310, 325, 330, 335, 359, 374, 380,390: n = A,T,C or G
ggaaaagggactggcctctctgaagagtgagatgagggaagtggaaggagagctggaaaggaaggagctggagtttgacacgaatatggatgcagtacagatggtgattacagaagcccagaaggttgataccagaagccaagaacgctggggttacaatccaagacacactcaacacattagacgggctcctgcattctgatggaccaaccttttcangtggtaagattgaaganggggcctgggcttacctgggaagcaaaaacttttcccganccaaggaacccaggattcaaccangcnacttgcnggccaaggaaggcanaactnggaanaaaaggccccttaagcaaaagggncaccttcatttgctnggaaancagcctttanttggaatcttg

SEQ ID NO: 27 - DNA, 383 bp, Homo sapiens
  misc_feature 32, 38, 49, 100, 142, 147, 181, 250, 258, 272, 274, 297,340, 341, 366, 368, 377: n = A,T,C or G
aattgcaactggacttttattgggcagttacnacaacnaatgttttcanaaaaatatttggaaaaaatataccacttcatagctaagtcttacagagaanaggatttgctaataaaacttaagttttgaaaattaagatgcnggtanagcttctgaactaatgcccacagctccaaggaanacatgtcctatttagttattcaaataccagttgagggcattgtgattaagcaaacaatatatttgttanaactttgnttttaaattactgntncttgacattacttataaaggagnctctaactttcgatttctaaaactatgtaatacaaaagtatanntttccccattttgataaaagggccnangatactgantaggaa

SEQ ID NO: 28 - DNA, 401 bp, Homo sapiens
  misc_feature 212: n = A,T,C or G
ggtcgcgtttcccctggctcacagtctgccattatttgcatttttaaatgaagaaaagtttaacgtggatggatggacagtttacaatccagtggaagaatacaggaggcagggcttgcccaatcaccattggagaataacttttattaataagtgctatgagctctgcgacacttaccctgctcttttggtggttccgtatcgtgcctcanatgatgacctccggagagttgcaacttttaggtcccgaaatcgaattccagtgctgtcatggattcatccagaaaataagacggtcattgtgcgttgcagtcagcctcttgtcggtatgagtgggaaacgaaataaagatgatgagaaatatctcgatgttatcagggagactaataaacaaatttcta

SEQ ID NO: 29 - DNA, 401 bp, Homo sapiens
atatgagtttgccatctccatggatgccatttcaatgccttcagggtaatcattctctccccaaagactgcccacggggtcatcactcctgtgacgaaatgagggctggattgaagatgttctgctgagcacccccctggtcatctttggggtctcagaagagccataatcatgaccattctcagcatctgaataatcaggttctctccaagtgcttggcaagttctgattgtcctcagcactgggatagtctggctccccaaaaaagggtggagagttaggttgaatgtcagcgcctggataatcaggctttcccagagagtctgcgtatggattgattctaaaacttgtatgttccagattctttctggatcctggatggttcaaattggctctgggtc

SEQ ID NO: 30 - DNA, 401 bp, Homo sapiens
cctgaactatttattaaaaacatgaccactcttggctattgaagatgctgcctgtatttgagagactgccatacataatatatgacttcctagggatctgaaatccataaactaagagaaactgtgtatagcttacctgaacaggaatccttactgatatttatagaacagttgatttcccccatccccagtttatggatatgctgctttaaacttggaagggggagacaggaagttttaattgttctgactaaacttaggagttgagctaggagtgcgttcatggtttcttcactaacagaggaattatgctttgcactacgtccctccaagtgaagacagactgttttagacagactttttaaaatggtgccctaccattgacacatgcagaaattggt

SEQ ID NO: 31 - DNA, 297 bp, Homo sapiens
acctccattaatgccaggtgttcctcctctgatgccaggaatgccaccagttatgccaggcatgccacctggattgcatcatcagagaaaatacacccagtcattttgcggtgaaaacataatgatgccaatgggtggaatgatgccacctggaccaggaataccacctctgatgcctggaatgccaccaggtatgcccccacctgttccacgtcctggaattcctccaatgactcaagcacaggctgtttcagcgccaggtattcttaatagaccacctgcaccaacagcaactgt

SEQ ID NO: 32 - DNA, 401 bp, Homo sapiens
caaacctggagccaaaaaggacacaaaggactctcgacccaaactgccccagaccctctccagaggttggggtgaccaactcatctggactcagacatatgaagaagctctatataaatccaagacaagcaacaaacccttgatgattattcatcacttgggtgagtgcccacacagtcaagctttaaagaaagtgtttgctgaaaataaagaaatccagaaattggcagagcagtttgtcctcctcaatctggtttatgaaacaactgacaaacacctttctcctgatggccagtatgtccccaggattatgtttgttgacccatctctgacagttagagcccgatatcactggaagatattcaaaccgtctctatgcttacgaacctgcagatacagct

SEQ ID NO: 33 - DNA, 401 bp, Homo sapiens
agcagagggacaggaatcattcggccactgttcagacgggagccacacccttctccaatccaagcctggccccagaagatcacaaagagccaaagaaactggcaggtgtccacgcgctccaggccagtgagttggttgtcacttactttttctgtggggaagaaattccataccggaggatgctgaaggctcagagcttgaccctgggccactttaaagagcagctcagcaaaaagggaaattataggtattacttcaaaaaagcaagcgatgagtttgcctgtggagcggtgtttgaggagatctgggaggatgagacggtgctcccgatgtatgaaggccggattctgggcaaagtggagcggatcgattgagccctggggtctggctttggtgaactg

SEQ ID NO: 34 - DNA, 401 bp, Homo sapiens
aacaatggctatgaaggcattgtcgttgcaatcgaccccaatgtgccagaagatgaaacactcattcaacaaataaaggacatggtgacccaggcatctctgtatctgtttgaagctacaggaaagcgattttatttcaaaaatgttgccattttgattcctgaaacatggaagacaaaggctgactatgtgagaccaaaacttgagacctacaaaaatgctgatgttctggttgcttgagtctactcctccaggtaatgatgaaccctacactgagcagatggggcaactgtggagagaaggggtgaaaggatcccacctcactcctgatttcattgcaggaaaaaagttagcttgaatatggaccacaaggtaagggcatttgtccatgaatggggctc

SEQ ID NO: 35 - DNA, 401 bp, Homo sapiens
  misc_feature 184, 208, 251, 263, 284, 293, 296, 337, 395: n = A,T,C or G
catttcttcctactagactgcccccttgatccactggcagaaatgatggcaccaccttgtcttcaggtggtgctccttcattattccaaggatgcagcatctctatggtgccaggtatgggggtaaagcctttggcgccctttccgcaatggcacatcagcagtaaaagtggtaccaatagcangaacagaaagggcaaaatcatgancgcaattgctgcgggtcccaagcccacataggaatcatgctgngcttccctgcanccgctgccatgcaagacactnacaaactgngantgtaaggacctgcttttcaggacaactaaaaccctgattgnctgaaatcaggaactgaatttcacttctcccaagctttttctcactttggtgcaacancacact

SEQ ID NO: 36 - DNA, 401 bp, Homo sapiens
cctgctagaatcactgccgctgtgctttcgtggaaatgacagttccttgttttttttgtttctgtttttgttttacattagtcattggaccacagccattcaggaactaccccctgccccacaaagaaatgaacagttgtagggagacccagcagcacctttcctccacacaccttcattttgaagttcgggtttttgtgttaagttaatctgtacattctgtttgccattgttacttgtactatacatctgtatatagtgtacggcaaaagagtattaatccactatctctagtgcttgactttaaatcagtacagtacctgtacctgcacggtcacccgctccgtgtgtcgccctatattgagggctcaagctttcccttgttttttgaaaggggttta

SEQ ID NO: 37 - DNA, 401 bp, Homo sapiens
  misc_feature 2, 3, 6, 9, 16, 18, 19, 23, 30, 33, 48, 56, 59, 62, 73, 75,81, 85, 88, 89, 114, 116, 121, 137, 149, 158, 161, 168,183, 192, 232, 251, 308, 345, 348, 354, 363, 369, 391, 397,400, 401: n = A,T,C or G
cnnctntgnaatggantnnttgnctaaaanganttgatgatgatgaanatccctangangantaagcatggancntgatcntttnctnngcactcctttacgacacggaaacangnatcancatgatggtaccaganaccttatcaccnacgcgcacnganctgactnattccaaagagttgnggttacggncatccggtcattgctcgtgcccattgctgcagggctgatnctactggtgcttattatgntggccctgaggatgctccacaatgaatataagcatgctgcatgatcagcggcaacanatgctctgccgtttgcactacatctttcacggacacnatntcgaanacgggcacnttgcanagttagacttggaatgcatggngccggncann

SEQ ID NO: 38 - DNA, 401 bp, Homo sapiens
aattggctcactctctcaaggcaagcactgtctcaaggcagtctcaaggcagagatgacacagcaaaaaacagagggggagaaaaaagtctattattggcttgtgatttacaaaagccaaagtcctttagataaaaggccaggagtcgtaccaacatagataccaaatccaggagaacacagaccagcgataagagggacgcttccccatgacccagaccagcctaaagcccctgtgggggcagccagtggggagctgtcagaccttggacatggtggtctttgagaatgggtctgcccttctctccctgaccagttgggatagacacctgactggaatccttgacactggcaggtgtttctatgaacagagaggactgtgcctgtcttcctgaatcccaa

SEQ ID NO: 39 - DNA, 401 bp, Homo sapiens
  misc_feature 8, 209: n = A,T,C or G
tctggtanggagcaattctattatttggcattgcatggctgggttgaattaaaacagggagtgagaacaggtgagtctagaagtccaactctgaaaaggaccactgtacatttgaacacacggctgtgttaaagatgctgctaatgtcagtcactgggtgcactaaaggatctcttattttatgtaaaacgttgggaatgacaagatanaactgatactctggtaagttaccctctgaagctacttcttgtgaaatactaatgacagcatcatcctgccaagcgaaagaggcaggcataagcaaggacaaattaaaagggggtaagagccttatcatgatgaggagtcttgttttgacatcttgggaaaagctgtccatagtgtgaagtcgtcaatttctc

SEQ ID NO: 40 - DNA, 401 bp, Homo sapiens
tctggtcacccaactcttgtggaagaggggaattgagatcgagtactgaatatctggcagagaggctggaatccttcagccccagagcccagggaccactccagtagatgcagagaggggcctgcccaggggtcagggcagtgggtatcactggtgacatcaagaatatcagggctggggaggcatctttgtttcctggtgccctcctcaaagttgctgacactttggggacgggaaggggtagaagtagggctgctccttttggagctggagggaatagacctggagacagagttgaggcagtcgggctgtccaggttctaagcatcacagcttctgcactgggctctgaggagattctcagccagaggatcccagcctcctcctccctcaaatgtcaag

SEQ ID NO: 41 - DNA, 401 bp, Homo sapiens
  misc_feature 170, 317, 334, 364: n = A,T,C or G
ctggactaaaaatgtccactatggggtgcactctacagtttttgaaatgctaggaggcagaaggggcagagagtaaaaaacatgacctggtagaaggaagagaggcaaaggaaactaggtggggaggatcaattagagaggaggcacctgggatccaccttcttccttangtcccctcctccatcagcaaaggagcacttctctaatcatgccctcccgaagactggctgggagaaggtttaaaaacaaaaaatccaggagtaagagccttaggtcagtttgaaattggagacaaactgtctggcaaagggtgcganagggagcttgtgctcangagtccagcccgtccagcctcggggtgtangtttctgaagtgtgccattggggcctcaccttctctg

SEQ ID NO: 42 - DNA, 310 bp, Homo sapiens
ggttcgacaaatccccaaaaatggcaaattaagccctgtgacaaaataagttattggatcatacagaaatagcccaaatctggaaattttgaattaaaattgtaatcctgtaaaacaagttttggggtgaatggatttctttaataccaataatatttttaattcccaccacagatggatttgctgaatatgctaatgctgtgaatgagaaaacaattttggggtaggtatacccacaagtaatctgatgacaaaataaaccacagactgatgtcaaatggacaaaaaactgaaaatatgctgtgagaaa

SEQ ID NO: 43 - DNA, 401 bp, Homo sapiens
aggtcacttacacttgtgaccagtgtggggcagagacctaccagccgatccagtctcccactttcatgcctctgatcatgtgcccaagccaggagtgccaaaccaaccgctcaggagggcggctgtatctgcagacacggggctccagattcatcaaattccaggagatgaagatgcaagaacatagtgatcaggtgcctgtgggaaatatccctcgtagtatcacggtgctggtagaaggagagaacacaaggattgcccagcctggagaccacgtcagcgtcactggtattttcttgccaatcctgcgcactgggttccgacaggtggtacagggtttactctcagaaacctacctggaagcccatcggattgtgaagatgaacaagagtgaggatgat

SEQ ID NO: 44 - DNA, 401 bp, Homo sapiens
atccctgtaagtctattaaatgtaaataatacatactttacaacttctcttagtcggcccttggcagattaaatctttgcaaaattccatatgtgctattgaaaaatgaaataaaacctcagatgtctgaattcttatttcaaatacagttatataattattttaaattacaatatacaatttctgttaaatacaactgttaagggattctgagaacaattataagattataataatatatacaaactaacttctgaaatgacatgggttgtttccttcccaccctcctaccctctcaaagagtttttgcatttgctgttcctggttgcaaaaggcaaaagaaaatctaaaaatagtctgtgtgtgtccacgacatgctcgctcctttgagaatctcaaac

SEQ ID NO: 45 - DNA, 401 bp, Homo sapiens
  misc_feature 212, 224: n = A,T,C or G
gtgcctgctgcctggcagcctggccctgccgctgcctcaggaggcgggaggcatgagtgagctacagtgggaacaggctcaggactatctcaagagattttatctctatgactcagaaacaaaaaatgccaacagtttagaagccaaactcaaggagatgcaaaaaattctttggcctacctatactggaatggtaaactcccgcgtcatanaaataatgcaanaagcccagatgtggagtgccagatgttgcagaatactcactatttccaaatagcccaaaatggacttccaaagtggtcacctacaggatcgtatcatatactcgagacttaccgcatattacagtggatcgattagtgtcaaaggctttaaacatgtggggcaaagagatccccctg

SEQ ID NO: 46 - DNA, 401 bp, Homo sapiens
  misc_feature 70, 182: n = A,T,C or G
gtcagaattgtctttctgaaaggaagcactcggaatccttccgaactttccaagtccatccatgattcanagatactgccttctctctctctgggattttatgtgtttctgatagtgaattgttgatgtatttgctactttgcttcttttctctttcaagacttgatcattttatatgctgnttggagaaaaaaagaacttttggtagcaaggaggtttcaagaaatgattttggattttctgctgcggaatttctcggcacctacctgtagtatggggcacttggtttggttgcagagtaagaaggtggaagaatgagctgtacttggttaagcagttgaaaccttttttgagcaggatctgtaaaagcataattgaatttgtttcacccccgtggattc

SEQ ID NO: 47 - DNA, 401 bp, Homo sapiens
ggtctgcagcaatgcacttcaaccatacatactgcttccactagctaataccaaatgcaggttctcagatccagacaaatggaggaaaagaacatttatgcttccgtttcagaaagccaagtcgtagttttggcccttcctttctctaaagtttattcccaaaaacaggtagcattcctgattgggcagagaagaggatattttcagcccacatctgctgcaggtatgtcattttctcccatcttcactgtgactagtaaagatctcaccacttctctttggaatttccaactttgcttgtgattgaatgtcacttcgtgaatttgtattatgtcagatcacttggcattgctcttccatatgcatcaagttgccaggcactaaacccaatgttcatgaac

SEQ ID NO: 48 - DNA, 430 bp, Homo sapiens
acataacttgtaaactttttctgcttgggggctgtaacagacagaagagtaaagactacaaggattttctgaagatgcttcaatgaaaatcatcatttcctctttagtcatcccaagtcttggtttgaaaaacttgggcatggacttatacagaccttgaaccaccactgacttatcattgggtggcagaccttgaaaccaagctctctgtgttacttctgaaagtgcatcaattctgatttggctaagaacagaagacaaatactgggatcgtgattctgtgttatactctagccacagcatagcagcttctcgaacggtttcttccttttctacatttaaattgtcactactgagaatatctatcagtaggtcatgtgacagacctgccccggggccggcccgctcgatgcttgccgaatatcatggt

SEQ ID NO: 49 - DNA, 57 bp, Homo sapiens
  misc_feature 17, 44, 49: n = A,T,C or G
ggtattaacaatatcangcactcattcttcccctcttatgaaanggatnaattttta

SEQ ID NO: 50 - DNA, 327 bp, Homo sapiens
  misc_feature 6, 10, 20, 22, 25, 28, 30, 37, 40, 41, 42, 51, 58, 59, 68,69, 70, 75, 76, 79, 91, 95, 108, 109, 111, 142, 146, 180,200, 201, 213, 218, 233, 235, 247, 265, 290, 299, 306: n = A,T,C or G
gatggnggtntccacaagantnaangtncntattaantannncttgtaganccacttnnattaattgnnntatgnntgnccttctggtggntgtngaagcttcatatnntntttggacatcattacacgtcttagctctttnaagnacaactttaatgctatatgaattttgccattttngctaacactggtatgctccnngcatccaccatnccacntggaattatttattncnttcatattaatnttttgtttaccaaatctnacttgacccgaacgaaactttctgngtattttanggccccnccattcttacttttcaagcct

SEQ ID NO: 51 - DNA, 236 bp, Homo sapiens
cgtctcgaagaagcgctgcaggccgatgatggactgcacgtctgccttgtcctcagttaacttgttgaattgcttgaacatgcggcccacatcctgggcaaactcctgtggggagctgtagggaggtgacaacttctcctggaggcgggcacggatcagggtcagatccagggtgccaccgggctggtccagggagaaggtggagtcgtagccagacctgcccgggcggccgctcg

SEQ ID NO: 52 - DNA, 291 bp, Homo sapiens
  misc_feature 168, 197, 202, 209, 218, 257, 271, 287: n = A,T,C or G
ctcacatcctgggtccggctgtagagctgcaccatggtgctgagcgccccctccagctccttgtagatgtaaaggacggcgaaggagctgtagtctgtgtccacgatgcgcacgtccaggtagcccaaggccgggactctgaagttgtccctcggagcccaccttcangtactcgggcatccacctggttacagccnttcgncctcggnaactccatntggactttacaggccgccctcctctgtgggcctgatggnccttgcaggacatnggaacacgggagctcncttt

SEQ ID NO: 53 - DNA, 95 bp, Homo sapiens
  misc_feature 37, 60, 73, 76, 92: n = A,T,C or G
gtctgtgcagtttctgacacttgttgttgaacatggntaaatacaatgggtatcgctgancactaagttgtanaanttaacaaatgtgctgnttg

SEQ ID NO: 54 - DNA, 66 bp, Homo sapiens
  misc_feature 4, 8, 11, 13, 26, 27, 35, 38, 43, 47, 57: n = A,T,C or G
cctnaatnatntnaatggtatcaatnnccctgaangangggancggnggaagccggntttgtccgg

SEQ ID NO: 55 - DNA, 265 bp, Homo sapiens
  misc_feature 25, 223, 241, 254, 259: n = A,T,C or G
atctttcttctcagtgccttggccntgttgagtctatctggtaacactggagctgactccctgggaagagaggccaaatgttacaatgaacttaatggatgcaccaagatatatgaccctgtctgtgggactgatggaaatacttatcccaatgaatgccgtgttatgtttttgaaaatcggaaacgccagacttctatcctcattcaaaaatctgggccttnctgaaaaccagggttttnaaaatcccattcnggtcnccggcg

SEQ ID NO: 56 - DNA, 420 bp, Homo sapiens
  misc_feature 85, 164, 198, 228, 257, 261, 283, 298, 326, 385, 390: n = A,T,C or G
gagcggccgcccgggcaggtcctcgcggtgacctgatgggatttcaaaaccttggttctcagcaaggcccagatttttgaatgangatagaagtctggcgtttccgattttcaaaacataacacgcattcattgggataagtatttccatcagtcccacagacngggtcatatatcttgggtgcatccattaagttcntttgttaacatttgggcctctctttcccangggaattcagctcccagttgtttaccaanattnaactccaccggggccaaaggcncttgaaaaaaaaaanaattccttgtttaccttccttgggcttnaagttctggcgtccaaaagttcaatttgaaaactgcaccgcacttaccacgtctcttcnagaancctggggacacctcggccgcgaccacgcta

SEQ ID NO: 57 - DNA, 170 bp, Homo sapiens
gaagcggagttgcagcgcctggtggccgccgagcagcagaaggcgcagtttactgcacaggtgcatcacttcatggagttatgttgggataaatgtgtggagaagccagggaatcgcctagactctcgcactgaaaattgtctctccagacctcggccgcgaccacgcta

SEQ ID NO: 58 - DNA, 193 bp, Homo sapiens
attttcagtgcgagagtctaggcgattccctggcttctccacacatttatcccaacataactccatgaagtgatgcacctgtgcagtaaactgcgccttctgctgctcggcggccaccaggcgctgcaactccgcttcatcggcttcgcccagctccgccattgttcgccacctgcccgggcggccgctcgaa

SEQ ID NO: 59 - DNA, 229 bp, Homo sapiens
cgcaactctcgagcatttatatacaatagcaaatcatccagtgtgttgtacagtctataatactccaacagtctcccatctgtattcaatggcgccacccaatacagtcctttgtttggatgctggggagagtaatccctaccccaagcaccatatagataagaaaaccctctccagttgagctgaaccacagacggtttgctgatacctgcccgggcggccgctcgaa

SEQ ID NO: 60 - DNA, 340 bp, Homo sapiens
tcgagcggccgcccgggcaggtcctctaaagatcaaaacacccctgtcgtccaccctcctcccactccagggaagctgtggtcatggtggtgtggtgaacatcagcaaaccgtctgtggttcagctcaactggagagggttttcttatctatatggtgcttggggtagggattactctccccagcatccaaacaaaggactgtattgggtggcgccattgaatacagatgggaaactgttggagtattataaactggtacaacacactggatgatttgctattgtatataaatgctcgagaattgcggatcacctatggacctcggccgcgaccacgctg

SEQ ID NO: 61 - DNA, 179 bp, Homo sapiens
  misc_feature 16, 76, 96, 110, 112, 122, 138, 140, 143, 155, 161, 163,175, 178: n = A,T,C or G
tttttgtgacggacgnttggagtacatgtcccaggatcacatccagcagctagagtggctgggacaagctggcggnggccaagcactgttgaaacnataggggtctgggngnactcgggttnaagtggttggtccgantnttnataaccttgtcngaaccnancatctcggttgncang

SEQ ID NO: 62 - DNA, 78 bp, Homo sapiens
  misc_feature 51, 72: n = A,T,C or G
agggcgttcgtaacgggaatgccgaagcgtgggaaaaagggagcggtggcnggaagacggggatgagcttangacaga

SEQ ID NO: 63 - DNA, 410 bp, Homo sapiens
  misc_feature 48, 95, 182, 290, 314, 350, 365, 380: n = A,T,C or G
cccagttacttggggaggctgaggcagggagaatcctttgaacccggngggtgggaggttgcagtgagcccgagatagcaccattgcacttccancatggggtggacagagtgagactctatctcaaaaaaaaagaaaagaaaaggaaagagattagattaagattaagtacctacttcctntcccatttcaagtcctgaaaatagaggatcagaaatgttgaggaattctttaggatagaaagggagatgggattttacttatggggaaagaccgcaaataaagactgnaacttaaccacattccccaagtgnaaggtgttacccaagaagtaggaacccttttggctnttaccttaccttccngaaaaaaacttattncttaaaatggaaacccttaaagcccgggca

SEQ ID NO: 64 - DNA, 199 bp, Homo sapiens
  misc_feature 153, 156, 158, 162, 170, 171, 184, 192: n = A,T,C or G
cttgttctcaaaaaggtcaaagggagcccgacgaggaataaatagcaatgccctgaattccaactgaccttctacagaaaagtgcttgactgccaagtggtcttcccagtcattagtgaggctcttgtagaattctccatactcctcttgggngangncatnagggtttnnggcccaaataggntgggcctngttaagt

SEQ ID NO: 65 - DNA, 125 bp, Homo sapiens
  misc_feature 115, 118, 120: n = A,T,C or G
agcggtacagttctgtcctggcatcatcattcattgtagtatggtcaataggtgccatgaaactcagtagcttgctaaggacatgaaaccgaagtttcctgcctttgctggcctngtngngggta

SEQ ID NO: 66 - DNA, 204 bp, Homo sapiens
attcagaattctggcatcggtatttctataaagtccatcagttagagcaggagcaggcccggagggacgccctgaagcagcgggcggaacagagcatctctgaagagcccggctgggaggaggaggaagaggagctcatgggcatttcacccatatctccaaaagaggcaaaggttcctgtggacctcggccgcgaccacgcta

SEQ ID NO: 67 - DNA, 383 bp, Homo sapiens
  misc_feature 32, 46, 59, 132, 190, 234, 264, 272: n = A,T,C or G
tcagggcctccaggcagccagttttgcagganattcagcacctagngtcttcctgcctnacgctcccaagaacctgctcctgcagggggaacatcagaactcgtccttgatgtcaaaatggggctggtcttnaggcttgaagtccaggttagggctgccatcctcattgagaattctccgggcagtgtanccgacgatggggtatttggctttgtacactttggtgaaaacctnatccagggcctccagttccttggccgtganacccgtantgtcatgggtgaggtctgcaggatccaaggacatcttggctacccctctagtggagtccttccccgtcaaggcattgtaaggggctcctcgtccataaaactccttttcgg

SEQ ID NO: 68 - DNA, 99 bp, Homo sapiens
tcacatctccttttttttttaactttttcaaatttttgtgttaaatagaaggctaaagggttagatttaagtttctgctacattgaccctatttaccta

SEQ ID NO: 69 - DNA, 37 bp, Homo sapiens
  misc_feature 10, 16, 21, 24, 27, 29: n = A,T,C or G
gagaaggacntacggncctgntantanangaatctcc

SEQ ID NO: 70 - DNA, 222 bp, Homo sapiens
  misc_feature 196: n = A,T,C or G
gtgggtcatttttgctgtcaccagcaacgttgccacgacgaacatccttgacagacacattcttgacattgaagcccacattgtccccaggaagagcttcactcaaagcttcatggcgcatttcgacagattttacttccgttgtaacgttgactggagcaaaggtgaccaccataccgggtttgagaacacccantcacctgccccgggcggccgctcgaa

SEQ ID NO: 71 - DNA, 428 bp, Homo sapiens
  misc_feature 281, 308, 364, 376, 383, 397, 413, 420: n = A,T,C or G
caggagtattttgtagaaaagccagaagagcattagtagatgtatggaaatatacggtagggcacacgctgacagtacttttcccaagccacgccgtatttcttcttacagtggtactcgtcacgagcttctcggtggacaagcaacatggtgaaataaattatgtagaaataaggcagaatgtggttaaaaccacatgggagggaccacgccaaggccatgatgagatcacccaagtaattggggtggcgaacaaagccccaccatccagaaactagaanaatttttcccgttgaaatatgaatggnttttaaatgtgcaagctttggatcactgggaattttcccgaatgcctttttctganaattgcaccttnggaagantccttaccccaagnttcagaccattatttnaaaagcnttggaact

SEQ ID NO: 72 - DNA, 264 bp, Homo sapiens
  misc_feature 218, 236, 247, 256: n = A,T,C or G
gaataaagagcttactggaatccagcagggttttctgcccaaggatttgcaagctgaagctctctgcaaacttgataggagagtaaaaagccacaatagagcagtttatgaagatcttggaggagattgacacacttgatcctgccagaaaatttcaaagacagtagattgaaaaggaaaggctttggtaaaaaaaggttcaggcattcctagccgantgtgacacagtggagcanaacatctgcangagactgancggctgca

SEQ ID NO: 73 - DNA, 442 bp, Homo sapiens
  misc_feature 249, 283, 313, 385, 390, 407: n = A,T,C or G
ggcgaatccggcgggtatcagagccatcagaaccgccaccatgacggtgggcaagagcagcaagatgctgcagcatattgattacaggatgaggtgcatcctgcaggacggccggatcttcattggcaccttcaaggcttttgacaagcacatgaatttgatcctctgtgactgtgatgagttcagaaagatcaagccaaagaacttcaaacaagcagaaagggaagagaagcgagtcctcggtctggngctgctgccaagggagaatctggtctcaatgacngtagaaggaccttcttccaaagatactggnattgctcgagttccacttgctggaacttcccggggcccaaggatcgcaaggcttctggcaaaagaaatccanacttnggccgggaccacctaanccaattcacacactggcggccgtactagtggatcc

SEQ ID NO: 74 - DNA, 337 bp, Homo sapiens
  misc_feature 167, 268: n = A,T,C or G
ggtagcagcgtctccagagcctgatctggggtcccagatacccaggcagcagcagccctggaggtaaagggcaagctccccaatgtgaggggagaccccattcctggtcagccaggctttcagaggagatagcaggtcgagggagccaacgaagaagagactgccancaggggaaggactgtcccgccaaggacagaactgattcaggggggtcaatgctcctctagagaagagccacacagaactggggggtccaggaaccatgaancttggctgtggtctaaggagccaggaatctggacagtgttctgggtcataccaggattctggaattgta

SEQ ID NO: 75 - DNA, 588 bp, Homo sapiens
  misc_feature 444, 495, 531, 562: n = A,T,C or G
catgatgagttctgagctacggaggaaccctcatttcctcaaaagtaatttatttttacagcttctggtttcacatgaaattgtttgcgctactgagactgttactacaaactttttaagacatgaaaaggcgtaatgaaaaccatcccgtccccattcctcctcctctctgagggactggagggaagccgtgcttctgaggaacaactctaattagtacacttgtgtttgtagatttacactttgtattatgtattaacatggcgtgtttatttttgtatttttctctggttgggagtatgatatgaaggatcaagatcctcaactcacacatgtagacaaacattagctctttactctttctcaaccccttttatgattttaataattctcacttaactaattttgtaagcctgagatcaataagaaatgttcaggagagangaaagaaaaaaaatatatgttccccatttatatttagagagagacccttantcttgcctgcaaaaagtccacctttcatagtagtangggccacatattacattcagttgctataggncagcactgaactgcattacctgggca

SEQ ID NO: 76 - DNA, 196 bp, Homo sapiens
gcggtatcacagcctggcccccatgtactatcggggggcccaggctgccatcgtggtctatgacatcaccaacacagatacatttgcacgggccaagaactgggtgaaggagctacagaggcaggccagccccaacatcgtcattgcactcgcgggtaacaaggcagacctggacctgcccgggcggccgctcgaa

SEQ ID NO: 77 - DNA, 458 bp, Homo sapiens
  misc_feature 196, 335, 409, 410, 417, 442, 447, 450: n = A,T,C or G
agtagagatggggtttcactgtgttaaccaggatggtcttgatctcctggcctcgtgatctgcccgcctcggcctcccaaagtgttgggattacaggcgtgaaccaccgcacccggccagaaatgttagtttttccctattctctctcctttttcctattatatacttggtcaaccagacagccatcctaccccanaatggtaatgcctcttcattcctcatatgagggaataaaagagaaaaaagcttttggaaaacatccacttatctaatcatcccaaatatgtaatcaaaagtatacaactcatgtgaagaatacactggtaaaatgttantataggccaaggtatcttgaattcctatatagaaagctggtaaatgcccttttggctggaaccgccatcttccnntaattcncccaaaatgaccaaacacaaagggnaaganganaagccccc

SEQ ID NO: 78 - DNA, 464 bp, Homo sapiens
  misc_feature 376, 397, 442, 454: n = A,T,C or G
tccgcaaatttcctgccggcaaggtcccagcatttgagggtgatgatggattctgtgtgtttgagagcaacgccattgcctactatgtgagcaatgaggagctgcggggaagtactccagaggcagcagcccaggtggtgcagtgggtgagctttgctgattccgatatagtgcccccagccagtacctgggtgttccccaccttgggcatcatgcaccacaacaaacaggccactgagaatgcaaaggaggaagtgaggcgaattctggggctgctggatgcttacttgaagacgaggacttttctggtgggcgaacgagtgacattggctgacatcacagttgtctgcaccctgttgtggctctataagcaggntctagaaccttcttttcgcangaccttcggccggaccacgcttaacccaaattccacacacttgcnggccgtactaanggaatcccac

SEQ ID NO: 79 - DNA, 380 bp, Homo sapiens
  misc_feature 164, 188, 350: n = A,T,C or G
ctgtatgaccagtttttccatctccttcacttctaccttgatcagctcgaagtccagttcagtgtaagaaatggtatccttctccatgatgtcaattcggacagttaggtttaacagtttcttttcatacacactaattaattggacatattccctcactttanaaagttctttctcaaacttctganaaaagaacatgaactgtgaattccaagcgttcccactctgtccacgggaaaaggtggtgtctggcagggaaacagaacactggcaggtccacggtcatccacggagccggtgaaattgggaaaacaactgggacacagaacctccgctgcctaagctgcggntgggagcttggaacccgacctggaactgga

SEQ ID NO: 80 - DNA, 360 bp, Homo sapiens
  misc_feature 42, 130, 131, 134, 200, 210, 226, 243, 257, 273, 278, 295,303, 316, 337, 344, 357, 360: n = A,T,C or G
tcgagcggccgcccgggcaggtcctcagagagctgtttgttncgcttcttcaaaaactcctattctccacttctgctaaaggactggatgacatcaattgtgatagcaatatttgtgggtgttctgtcanncancatcgcactcctgaacaaagtagatgttggattggatcagtctctttccacccagatgactcctanatggtggatnatttcaaatccatcantcagtacctgcatgcgnggtccgcctgtgtnctttgtcctgcaggangggcnctactacacttcttccnaggggcanaacatggtgtgcngcggccatgggctggcaacantgattcnctgctgcacccanatn

SEQ ID NO: 81 - DNA, 440 bp, Homo sapiens
  misc_feature 121, 132, 191, 211, 224, 312, 342, 354, 360, 407, 412, 427: n = A,T,C or G
acgtggtccggcgagtctgacctgcagatatgaactccttgggaaacctacattctgcctcagacatactgggggcaaatggctttaaaagtctggctcagggagccaagattacagaaanccgttgagtcnccatacatggacactgacaaaggaactgaagatatccaaacaagccctcctggtcccgngcctgcataaagatcgggancggaacggtaccngacgtctgtggtcaggggttgtggaaaattggaaaaaaccagtcctgcccacattgacagggaagcctcaacggaaattgaacagatngtcttatcaccagtctcccctcctggatcntgtctcggctcnggggantcagtgatcagtcctttcaggtggaagaagcaaagaagatcaacaanaagcngatcctctcacctgntaccagcatatgg

SEQ ID NO: 82 - DNA, 264 bp, Homo sapiens
  misc_feature 18, 54, 130, 137, 162, 175, 184, 190, 192, 202, 206, 213,218, 241, 260: n = A,T,C or G
agcgtggtcgcggccgangtcctgacattcctgccttcttatattaattatacnaataaaacaaaatagtgttgaagtgttggagcggcgaaaatttttggggggtggtatggacagagaatgggcgatnttctcanggctgcttcaagtgggattggggcngcgtgggatcatncagtggganagattncnctgaccggantctnttggtanggatnatcttgtggggatgtgcaagagncattcgtctcctgaatgantggt

SEQ ID NO: 83 - DNA, 410 bp, Homo sapiens
  misc_feature 2, 18, 169, 209, 245, 263, 265, 284, 378: n = A,T,C or G
ancgtggtcgcggccgangtccacagttgtgggagagccagccattgtgggggcagctccacaggtaagactcgtgtcctgagcagcgcacatcatccaggacaatgggtcctgagccctgaccaaaccgggcatttcctggggctgacatggcccagccacagcccanttgcctgcagacgaaattggcatcattggtgtcccagtantcatcacacacggtgccccaggaacctccggtatangaactccactcggcctcnanacctgtcgcctccattccncagcctcagggggcaaactgggattcagatccttctgtgggtacaggtggtgatatcctgacaggccaactttctggcctgagtgttgactgangctgggcagacctgcccgggcggccgctcgaa

SEQ ID NO: 84 - DNA, 320 bp, Homo sapiens
  misc_feature 61, 81, 82, 90, 98, 111, 153, 182, 184, 187, 189, 198, 210,211, 212, 238, 262, 277, 279, 289, 295, 299, 318, 320: n = A,T,C or G
tcgaacggccgcccgggcaggtctgccccaggtgtatccatttgccgccgatctctatcanaaggagctggctaccctgcnncgacgaantcctgaanataatctcacccncccagatctctctgtcgcaatggagatgtcgtcatcggtggncctgatcacagggcattggactcagaganangtnancacagtgtngaagcgattgannnagttcagttgctggtcttacccgatnttggaaggaaggaaaacgtgttangacgtatctcgatgnanttgaccaaanctgaangctncagggggcatcgcaaaganan

SEQ ID NO: 85 - DNA, 218 bp, Homo sapiens
  misc_feature 117, 120, 152, 155, 193, 194: n = A,T,C or G
tcgagcggccgcccgggcaggtctgctgcccgtgctggtgccattgccccatgtgaagtcactgtgccagcccagaacactggtctcgggcccgagaagactcctttctccaggctntangtatcaccactaaaatctccaggggcaccatnganatcctgggtgtccgcaatgttgccaatgtctgtccgcnnattggctacccaactgttgcatca

SEQ ID NO: 86 - DNA, 283 bp, Homo sapiens
  misc_feature 25, 183, 193, 204, 225, 240: n = A,T,C or G
tcgacttcttgtgaaggttttgganaaatatgtatcagttcgttttatttgggtattcaataatatccttggtgataatgctgactccatggcttctgaccccaaaaattgaccctgctgccactggttgtagccctgagattgatttttgtagccacgattgtttcctcgtcctctgaagtnctggttgtanttccctctgtngggcattcccctctgttgtanttccctctgtttgantaactaccacggccaggaaaaacaggggcacgaaggtatggat

SEQ ID NO: 87 - DNA, 179 bp, Homo sapiens
  misc_feature 66, 81, 89, 113, 120, 135, 148, 161: n = A,T,C or G
agcgtggtcccggccgatgtctttctgtgtaagtgcataacactccacatacttgacatccttcangtcacgggccagctnttcagcantctctggagtgataggctactgtntgttctnggcaagtgtctcaanaatacaggggtcntctctgagatgantttcagtcccgaaccctc

SEQ ID NO: 88 - DNA, 512 bp, Homo sapiens
  misc_feature 27, 30, 75, 106, 198, 216, 294, 349: n = A,T,C or G
tcgagcggccgcccgggcaggtcctancanagaatcaccaaatttatggagagttaacaggggtttaacaggaangaagtgcctttagtaagttctcaagccagangctggaggcagcagctaaatcagaggacaggatcctcagtgaaagtgagccattcggggtggcatgtcactccaggaataagcacaacttanaaacaaatgatttcgtangatagcacagtgacattggtgcacttgtgaacctgaggccactgtgtcaaactgtgcactggttgtgaatagggaganccaaaaattatgtcctactgggtaatgagctttcaatgggctcgatcctctcacnctgaaagctctgtagagcagctcagaaccacaaccactcccaacattgacccttctgggggtactgtctgtggcacccacaggaaggagctggagatccccattaggactgtccacccacacttgaagccacaaaactgcacctcggccgcgaccaccgctta

SEQ ID NO: 89 - DNA, 358 bp, Homo sapiens
  misc_feature 65, 207, 214, 221, 257, 258, 266, 271, 287, 297, 307, 308,325: n = A,T,C or G
tcgagcgggccgcccgggcaggtctgccagtccccatcccagacattctttgcatctaagctgangtctgaactgagtggggtgggctggtgtttccatcctcacaactccagtgagccgggtgtggccgtggcctgcgtctctctggcggttagtgatgttggcatcatccacctttttcaaaacaaaagcactggactgaagaanaatcccnccctgtntccacccagtccatggtttttaataaaagggttatnnaagttgancaagncatcaccacacacaancctaagaacntttttcatcnntccccaaaacaaacccncaccctgggaactccgggcgcgaaccacgccta

SEQ ID NO: 90 - DNA, 250 bp, Homo sapiens
  misc_feature 125, 163, 172, 199, 244: n = A,T,C or G
cgagcggccgcccgggcaggtctggatggggagacggactggaactgcggcttcccgtggcctgcacgcacaaggctccccacggccgccgaccttcttcagattcgatcgtatgtgtacgcacnaagagccaaatattgacattcacaacttcgtgggaatnttaccccanaagactgcgaccccccgatcaggcganagcctgagcatagaagaacaccgctgtgggcttggcactgtgggncccatc

SEQ ID NO: 91 - DNA, 133 bp, Homo sapiens
  misc_feature 12, 56, 58, 61, 78, 82, 107, 116, 123, 126: n = A,T,C or G
tcgagcggccgnccgggcaggtcccgggtggttgtttgccgaaatgggcaagttcntnaancctgggaaggtggtgcntgtnctggctggacgctactccggacgcnaagctgtcntcgtgangancattgat

SEQ ID NO: 92 - DNA, 232 bp, Homo sapiens
  misc_feature 18, 168, 173, 179, 219: n = A,T,C or G
agcgtggtcgcggccgangtctgtcactttgcgggggtagcggtcaattccagccaccagagcatggctgtaggggcgatctgaggtgccatcatcaatgttcttcacgatgacaagctttgcgtccggagtagcgtccagccaggacaagcaccaccttcccacgtnttcangaactngcccatttcggcataaccacccgggacctgcccgggcggncgctcgaaaagcc

SEQ ID NO: 93 - DNA, 480 bp, Homo sapiens
  misc_feature 19, 27, 221, 406, 439: n = A,T,C or G
agcgtgggtcgcggccgangtctgtangctcaccggccagagaagaccactgtgagcattttgccgtatatcctgccctgccatttgttcactttttaaactaaaataggaacatccgacacacaccgtttgcatcgtcttctcccttgatattttaagcattttcccatgtcgtgagtttctcagaaacatgtttttaacaattgtactatttagtcatngtccatttactataatttatctgaccatttccctactgttaaaatacttaagacggtttctgatttttccactatttaaataatgctgtgatgaatatctttaaaatcttctgatttcttacttttttcccccttagatgcctggaagtggtattttgaggtgaaagagtttgttcattttgaanatatttctgtctctctctcgacctgatgtgtanacgctcacttccagttagcagaaccaccttagtttgtgtct

SEQ ID NO: 94 - DNA, 472 bp, Homo sapiens
  misc_feature 9, 33, 70, 105, 129, 135, 136, 154, 180, 190, 213, 232, 235,286, 292, 293, 305, 335, 341, 363, 372, 400, 418, 422, 425,472: n = A,T,C or G
tcgagcggncgcccgggcagggtctgatgtcantcacaacttgaagggatgccaatgatgtaccaatccnatgtgaaatctctcctcttatctcctatgctgganaagggattacaaagttatgtggcngataannaattccatgcacctctantcatcgatgagaatggagttcatganctggtgaacnatggtatctgaacccgataccangttttgtttgccacgatangantagcttttatttttgatagaccaactgtgaacctaccacacgtcttggacnactganntctaactatccncagggttttattttgcttgttgaactcttncagctnttgcaaacttcccaagatccanatgactgantttcagatagcatttttatgattcccanctcattgaaggtcttatntatntcnttttttccaagccaaggagaccattggacctcggccgcgaccacctn

SEQ ID NO: 95 - DNA, 309 bp, Homo sapiens
  misc_feature 97, 117, 139, 173, 184, 193, 206, 230, 236, 239, 242, 265,280, 299: n = A,T,C or G
tcgagcggccgcccgggcagagtgtcgagccagcgtcgccgcgatggtgttgttggagagcgagcagttcctgacggaactgaccagacttttccanaagtgccggacgtcgggcancgtctatatcaccttgaagaantatgacggtcgaaccaaacccattccaaagaaangtactgtgganggctttgancccgcagacaacnagtgtctgttaagaactaccgatnggaaanaanaanatcagcactgtgggtgagctccnagggaagttaataantttcggatgggcttattcnaacctcctta

SEQ ID NO: 96 - DNA, 371 bp, Homo sapiens
  misc_feature 327: n = A,T,C or G
tcgagcggccgcccgggcaggtccaccactcacctactccccgtctctatagatttgcctgttctgggcagttctcagcaatggaatcctactgtgtatctttttgtgactggttctttaactcagcatcacattttcaaggttcatccatgctgcagcctggctccgtactggtgacagtacttcatttctctctcccttttgttcagaccaaggtctccctctgtccccaaggctaaagtgcagttggtgtgatcatggctcactgcagcctcaaactcctggactcaaacagtcctcccatctcagcctcccaaagtgctgatnttataagttgcaagccctgcacccagcctgtatctccagtttgt

SEQ ID NO: 97 - DNA, 430 bp, Homo sapiens
  misc_feature 5, 25, 30, 34, 41, 42, 43, 44, 46, 60, 97, 116, 141, 145,158, 183, 184, 226, 232, 243, 245, 257, 271, 288, 298, 300,303, 308, 318, 325, 329, 354, 390, 428: n = A,T,C or G
tcgancggccgcccgggcaggtttnttttntttnttttttnnnngntagtatttaaaganatttattaaatcatcttatcaccaaaatggaaacatnttccaactagaaacatgcnaccatcatcttccccagtccagtcncaangtccaatattttncttgcctctgcagataaaaagttcnnatttttatacccactcttactcccccccaaaattttaattcngtcctnccctaaaattncnccgggtaacaanttaccaaaatggcnaaccaattattttaaanaaaagttgcncnttnaaaanggaaactttntggcaanttancctcttttcccttcccaccccccantttaaggggaaaacaatggcactttgctcttgcttnaacccaaaattgtcttccaaaaactattaaaaatgttnaa

SEQ ID NO: 98 - DNA, 307 bp, Homo sapiens
  misc_feature 3, 15, 19, 20, 25, 28, 43, 70, 75, 81, 102, 139, 162, 203,259, 260, 283, 295: n = A,T,C or G
tcnaacggccgcccnggcnngtctngcngcacctgtgcctcanccgtcgatacctggtcgattgggacanggaanacaatntggttttcagggaggccacanatttggagaaacggatgaattctcctttattccgaantcagctccttggtctccgtaganggtgatcttgaaattctcctgttttgaaaactttcttgaanaaaccttacctgctggttgtatttggtctcccactcggacaagtactcgttatccnnggtactcttaatgtgcccacgtnaactccccgggntggcaactggaa

SEQ ID NO: 99 - DNA, 207 bp, Homo sapiens
  misc_feature 5, 19, 24, 25, 38, 46, 59, 61, 66, 69, 81, 83, 88, 96, 98,104, 106, 115, 126, 132, 135, 146, 152, 160, 165, 172, 173,187, 188, 189, 192, 202, 203: n = A,T,C or G
gtccnggaccgatgttgcnaaganntttcttggtccantaggttcnaaaaaatgataancnaggtntancacgtgaagatntntatanagtcttantnaaaacncntagatctgnatgacgataantcgaanacngggggaggggntgaggngaggtggngtganggaaganntgttgataaaagannnagntgataagaanngagc

SEQ ID NO: 100 - DNA, 200 bp, Homo sapiens
  misc_feature 3, 5, 6, 14, 21, 23, 29, 46, 71, 150, 151, 166, 176, 185,186, 195: n = A,T,C or G
acntnnactagaantaacagncnttctangaacactaccatctgtnttcacatgaaatgccacacacatanaaactccaacatcaatttcattgcacagactgactgtaattaattttgtcacaggaatctatggactgaatctaatgcnnccccaaatgttgttngtttgcaatntcaaacatnnttattccancagat

SEQ ID NO: 101 - DNA, 51 bp, Homo sapiens
  misc_feature 35: n = A,T,C or G
tcgagcggccgcccgggcaggtctgaccagtgganaaatgcccagttattg

SEQ ID NO: 102 - DNA, 385 bp, Homo sapiens
  misc_feature 50, 145, 202, 214, 306, 362: n = A,T,C or G
aacgtggtcgcggccgaagtccatggtgctgggattaatccactgtgacngtgactctgagttgagttgtttttcaatcttctccaagcctgtggactcatcctccacatccttgggtagtaggatgaacatgctgaagatgctnattttgaaaaggaactctatgaatcttacaattgaatactgtcaatgtttccccatnacagaacgtggncccccaaggttccatcatctgcactgggtttgggtgttctgtcttggttgactcttgaaaagggacatttctttttgttttcttgaattcanggaaattttcttcatccactttgcccacaaaagttaggcagcatttaacccccaanggattttgggtctgggtccttcc

SEQ ID NO: 103 - DNA, 189 bp, Homo sapiens
  misc_feature 72, 138, 156: n = A,T,C or G
agcgtggtcgcggccgaagtctgcagcctgggactgaccgggaagctctgattatttacccaccacaggtangttgtgttctgaatctcaagttcacaggttaaggctacagcatcctcatcctccacggggttgganttgttgctggtgatgaanggtttggggtggctctgcataactgttgatctc

SEQ ID NO: 104 - DNA, 181 bp, Homo sapiens
  misc_feature 38, 82, 83, 97: n = A,T,C or G
tcgagcggccgcccgggcaggtccaggtctccaccaangcaccaccgtgggaagctggtaattgatgcccaccttgaagccnntggggcaccatccnccaactggatgctgcgcttggttttgatggtggcaatggcacattgactcttttgggaaccacttcaccacggtacaacaggca

SEQ ID NO: 105 - DNA, 327 bp, Homo sapiens
  misc_feature 80, 116, 167, 175, 182, 194, 210, 277: n = A,T,C or G
tcgagcggccgcccgggcaggtcttctgtggagtctgcgtgggcatcgtgggcagtggggctgccctggccgatgctcanaaccccagcctctttgtaaagattctcatcgtgganatctttggcagcgccattggcctctttggggtcatcgtcgcaattcttcanacctccanaatgaanatgggtgactanataatatgtgtgggtngggccgtgcctcacttttatttattgctggttttcctgggacagaactcgggcgcgaacacgcttanccgaattccaacacactggcgggcgttactagtggatccgagctcggtac

SEQ ID NO: 106 - DNA, 268 bp, Homo sapiens
  misc_feature 18, 73, 96, 117, 129, 161, 195, 219, 247, 250, 255, 257: n = A,T,C or G
agcgtggtcgcggccgangtctggcgtgtgccacatcggtcccacctcgctttacaaaacagtcctgaacttnatctaataaaattattgtacacnacatttacattagaaaaaganagctgggtgtangaaaccgggcctggtgttccctttaagcgaangtggctccacagttggggcatcgtcgcttcctcnaagcaaaaacgccaatgaaccccnaagggggaaaaaggaatgaaggaactgnccngggangnccgctccgaaa

SEQ ID NO: 107 - DNA, 353 bp, Homo sapiens
  misc_feature 70, 167, 179, 184, 185, 196, 198, 215, 216, 221, 235, 286,288, 299, 312, 321, 335, 344: n = A,T,C or G
tcgagcggccgcccgggcaggtggccaggccatgttatgggatctcaacgaaggcaaacacctttacacnctagatggtggggacatcatcaacgccctgtgcttcagccctaaccgctactggctgtgtgctgccgcaggccccagcatcaagatctgggatttanagggaaagatcnttgtnnatgaactgaancntaaattatcagttccannaccangcaaaaaccacccngtgcactccctggcctggtctgctgatgggacctcgggcgcgaacacgctnancccaattccancacactgggcggncgttactantggatccgaactcnggtaccaancttggcgtt

SEQ ID NO: 108 - DNA, 360 bp, Homo sapiens
  misc_feature 61, 121, 145, 194, 202, 217, 237, 252, 254, 275, 279, 318,330, 343, 346, 352: n = A,T,C or G
agcgtggtcgcggccgaagtcctggcctcacatgaccctgctccagcaacttgaacagganaagcagcagctacatccttaaggtccggaaagttagatgaagatttggatcctgcattgncctgcctcccacctatctctcccnaattataaacagcctccttgggaagcagcagaatttaaaaactctcccnctgccctnttgaactacacaccnaccgggaaaacctttttcanaatggcacaaaaatncnagggaatgcatttccatgaangaanaaactgggttacccaaaattattgggttggggaaatccngggggggttttnaaaaaagggcaanccnccaaanaaaaaaac

SEQ ID NO: 109 - DNA, 101 bp, Homo sapiens
  misc_feature 10, 47, 77, 82: n = A,T,C or G
atcgtggtcncggccgaagtcctgtgtcctggatgggccgtgtgcancgaatccgttggcgactcctaactaccaanaaaangactctcggaagaaatttc

SEQ ID NO: 110 - DNA, 300 bp, Homo sapiens
  misc_feature 4, 56, 116, 130, 236, 243, 246, 248, 271, 276, 280: n = A,T,C or G
ccanggaaacccagagtcacatgagatagggtggctttcgggacagggggtcagangaatggtacatggatctcagcccctgatggacacggaacaggtgtggtcagaactcccangattctgcatccangatccagtctctatagaagttatggatcattccttcatttcattccccccttcatgaaaaaacttctgaacaagccttttttctcactttggggccctgtttggcncaaggtnttnanttggggaaaaaaaaacaaatccnttccnttanccctccgtggggaatgacct

SEQ ID NO: 111 - DNA, 366 bp, Homo sapiens
  misc_feature 42, 65, 90, 180, 250, 257, 264, 296, 333, 337: n = A,T,C or G
cgagcggccgcccgggcaggtccttgtgttgccatctgttancattgatttctggaatggaacanctttctcaaagtttggtcttgctantcatgaagtcatgtcagtgtcttaagtcactgctgctcacttccttacccagggaatatactgcataagtttctgaacacctgttttcantattcactgttcctctcctgcccaaaattggaagggacctcatttaaaaatcaaatttgaatcctgaaanaaaaacnggaaatntttctcttggaatttggaatagaattattcanttgaataacatgttttttccccttgccttgctcttcncaanaacatctggacctcggccgcgacacctta

SEQ ID NO: 112 - DNA, 405 bp, Homo sapiens
  misc_feature 7, 23, 29, 52, 119, 136, 139, 147, 172, 204, 232, 247, 320,323, 324, 362, 386: n = A,T,C or G
ctgactnctaaacttctaattcnatcaanataactactctccttccgtcttncagagtgttcacaataaatctgtgaatctggcatacacagttgctggaaaattgttcttcctccacnaaaaggtcaattgttcnccncatgaaanaagataaattgttcatccatcactnctgaaccatccaaaacgccggcggaattattnccccgttattatggggaacggaattttnaataaatttgggaangaatggggcttttattgttttgttttccccctttcttggcattgattgggccgcaatgggccccctcgctcanaanntgccccggggccggccgctccaaaaccgaaattcccanccacacttggcgggccgttactanttggatccgaactcggtta

SEQ ID NO: 113 - DNA, 401 bp, Homo sapiens
ggatagaagagtatatgggtttggcaccacggggtggataggcaaaacatttggttgataaggcgcagattctgaactaacttgtaaggcttgtctggttttaggacaggtaaaatgggggaatggtaaggagagtttataggttttaggagcccatgctgtagcaggcaagtgataacaggctttaatcctttcaaagcatgctgtgggatgagatattggcatttgagcggggtaagggtgattaggttttaatgagatggtaaggggtgcatgatccggtccgccaaggaagggaagtagaggtatcttatacttgtggggttaaggtgggggggatataagagggaggacgccaaaggaggctttggattaggaataaggggcggcaatgagatgca

SEQ ID NO: 114 - DNA, 401 bp, Homo sapiens
  misc_feature 2, 13, 17, 37, 277, 303, 318, 324, 381: n = A,T,C or G
angtccacaggangcangaggccaggctccgtcccanccagtccatgatgttgaagaggaggaagcagcacatggggttgaagaactgactccacttcccaggactggtggagctggtcaccatggctgtggtggcggggaagacggacagggtgacttctggaagacagtgaagactgaaggttttcctggcttctggggctcatctggctctgattccggctccttctccaggtcaagatccagggttcagagctactttcttgggggactactngggaatcccgttctcatctgggggtngaggggggacggggnaagggncatgcttgtgacccaggtttcccacctcggcccgcgaccacgctaaggcccgaattncagcacacttggcggcccgt

SEQ ID NO: 115 - DNA, 401 bp, Homo sapiens; identical to SEQ ID NO: 44

SEQ ID NO: 116 - DNA, 301 bp, Homo sapiens
  misc_feature 1, 12, 13, 33, 34, 88, 89, 90, 104, 106, 116, 121, 131, 142,147, 150, 160, 164, 166, 175, 197, 251, 285, 298: n = A,T,C or G
ngatttaattgnnagcttctttttaatggaatnnttggctaaaatgaattgatgattatgaatatccctaggaggagttagcatggannntgatcattttcttngnactcctttangacanggaaacaggnatcagcatganggtancanaaaccttatnaccnangcgcacganctgacttcttccaaagagttgnggttccgggcagcggtcattgccgtgcccattgctggagggctgattctagtgntgcttattatgctggccctgaggatgcttccaanatgaaaataagangct

SEQ ID NO: 117 - DNA, 383 bp, Homo sapiens; identical to SEQ ID NO: 27
  misc_feature 32, 38, 49, 100, 142, 147, 181, 250, 258, 272, 274, 297,340, 341, 366, 368, 377: n = A,T,C or G

SEQ ID NO: 118 - DNA, 301 bp, Homo sapiens
ctgctagaatcactgccgctgtgctttcgtggaaatgacagttccttgttttttttgtttctgtttttgttttacattagtcattggaccacagccattcaggaactaccccctgccccacaaagaaatgaacagttgtagggagacccagcagcacctttcctccacacaccttcattttgaagttcgggtttttgtgttaagttaatctgtacattctgtttgccattgttacttgtactatacatctgtatatagtgtacggcaaaagagtattaatccactatctctagtgcttgac

SEQ ID NO: 119 - DNA, 401 bp, Homo sapiens
taaggacatggacccccggctgattgcatggaaaggaggggcagtgttggcttgtttggatacaacacaggaactgtggatttatcagcgagagtggcagcgctttggtgtccgcatgttacgagagcgggctgcgtttgtgtggtgaatggggaggaaatgtcactgccgaagaccaaaaacaagcttcttggtataaaagactcttacagaatatgtgtattgtaatttattgatctggatgcttaagtgtcatggacagtaaatgaatttgaactttatgtttgaggacatgacattgggtttgaaaatataaactgcttttgagcagtttaagtcagggcatttgagaataaaataggaactttctcttcagtttgtaaaactctcttgccctctct

SEQ ID NO: 120 - DNA, 301 bp, Homo sapiens
tccagagataccacagtcaaacctggagccaaaaaggacacaaaggactctcgacccaaactgccccagaccctctccagaggttggggtgaccaactcatctggactcagacatatgaagaagctctatataaatccaagacaagcaacaaacccttgatgattattcatcacttgggtgagtgcccacacagtcaagctttaaagaaagtgtttgctgaaaataaagaaatccagaaattggcagagcagtttgtcctcctcaatctggtttatgaaacaactgacaaacacctttctc

SEQ ID NO: 121 - DNA, 2691 bp, Homo sapiens
gcttgcccgtcggtcgctagctcgctcggtgcgcgtcgtcccgctccatggcgctcttcgtgcggctgctggctctcgccctggctctggccctgggccccgccgcgaccctggcgggtcccgccaagtcgccctaccagctggtgctgcagcacagcaggctccggggccgccagcacggccccaacgtgtgtgctgtgcagaaggttattggcactaataggaagtacttcaccaactgcaagcagtggtaccaaaggaaaatctgtggcaaatcaacagtcatcagctacgagtgctgtcctggatatgaaaaggtccctggggagaagggctgtccagcagccctaccactctcaaacctttacgagaccctgggagtcgttggatccaccaccactcagctgtacacggaccgcacggagaagctgaggcctgagatggaggggcccggcagcttcaccatcttcgcccctagcaacgaggcctgggcctccttgccagctgaagtgctggactccctggtcagcaatgtcaacattgagctgctcaatgccctccgctaccatatggtgggcaggcgagtcctgactgatgagctgaaacacggcatgaccctcacctctatgtaccagaattccaacatccagatccaccactatcctaatgggattgtaactgtgaactgtgcccggctcctgaaagccgaccaccatgcaaccaacggggtggtgcacctcatcgataaggtcatctccaccatcaccaacaacatccagcagatcattgagatcgaggacacctttgagacccttcgggctgctgtggctgcatcagggctcaacacgatgcttgaaggtaacggccagtacacgcttttggccccgaccaatgaggccttcgagaagatccctagtgagactttgaaccgtatcctgggcgacccagaagccctgagagacctgctgaacaaccacatcttgaagtcagctatgtgtgctgaagccatcgttgcggggctgtctgtagagaccctggagggcacgacactggaggtgggctgcagcggggacatgctcactatcaacgggaaggcgatcatctccaataaagacatcctagccaccaacggggtgatccactacattgatgagctactcatcccagactcagccaagacactatttgaattggctgcagagtctgatgtgtccacagccattgaccttttcagacaagccggcctcggcaatcatctctctggaagtgagcggttgaccctcctggctcccctgaattctgtattcaaagatggaacccctccaattgatgcccatacaaggaatttgcttcggaaccacataattaaagaccagctggcctctaagtatctgtaccatggacagaccctggaaactctgggcggcaaaaaactgagagtttttgtttatcgtaatagcctctgcattgagaacagctgcatcgcggcccacgacaagagggggaggtacgggaccctgttcacgatggaccgggtgctgacccccccaatggggactgtcatggatgtcctgaagggagacaatcgctttagcatgctggtagctgccatccagtctgcaggactgacggagaccctcaaccgggaaggagtctacacagtctttgctcccacaaatgaagccttccgagccctgccaccaagagaacggagcagactcttgggagatgccaaggaacttgccaacatcctgaaataccacattggtgatgaaatcctggttagcggaggcatcggggccctggtgcggctaaagtctctccaaggtgacaagctggaagtcagcttgaaaaacaatgtggtgagtgtcaacaaggagcctgttgccgagcctgacatcatggccacaaatggcgtggtccatgtcatcaccaatgttctgcagcctccagccaacagacctcaggaaagaggggatgaacttgcagactctgcgcttgagatcttcaaacaagcatcagcgttttccagggcttcccagaggtctgtgcgactagcccctgtctatcaaaagttattagagaggatgaagcattagcttgaagcactacaggaggaatgcaccacggcagctctccgccaatttctctcagatttccacagagactgtttgaatgttttcaaaaccaagtatcacactttaatgtacatgggccgcaccataatgagatgtgagccttgtgcatgtgggggaggagggagagagatgtactttttaaatcatgttccccctaaacatggctgttaacccactgcatgcagaaacttggatgtcactgcctgacattcacttccagagaggacctatcccaaatgtggaattgactgcctatgccaagtccctggaaaaggagcttcagtattgtggggctcataaaacatgaatcaagcaatccagcctcatgggaagtcctggcacagtttttgtaaagcccttgcacagctggagaaatggcatcattataagctatgagttgaaatgttctgtcaaatgtgtctcacatctacacgtggcttggaggcttttatggggccctgtccaggtagaaaagaaatggtatgtagagcttagatttccctattgtgacagagccatggtgtgtttgtaataataaaaccaaagaaacata

SEQ ID NO: 122 - protein, 683 aa, Homo sapiens
MALFVRLLALALALALGPAATLAGPAKSPYQLVLQHSRLRGRQHGPNVCAVQKVIGTNRKYFTNCKQWYQRKICGKSTVISYECCPGYEKVPGEKGCPAALPLSNLYETLGVVGSTTTQLYTDRTEKLRPEMEGPGSFTIFAPSNEAWASLPAEVLDSLVSNVNIELLNALRYHMVGRRVLTDELKHGMTLTSMYQNSNIQIHHYPNGIVTVNCARLLKADHHATNGVVHLIDKVISTITNNIQQIIEIEDTFETLRAAVAASGLNTMLEGNGQYTLLAPTNEAFEKIPSETLNRILGDPEALRDLLNNHILKSAMCAEAIVAGLSVETLEGTTLEVGCSGDMLTINGKAIISNKDILATNGVIHYIDELLIPDSAKTLFELAAESDVSTAIDLFRQAGLGNHLSGSERLTLLAPLNSVFKDGTPPIDAHTRNLLRNHIIKDQLASKYLYHGQTLETLGGKKLRVFVYRNSLCIENSCIAAHDKRGRYGTLFTMDRVLTPPMGTVMDVLKGDNRFSMLVAAIQSAGLTETLNREGVYTVFAPTNEAFRALPPRERSRLLGDAKELANILKYHIGDEILVSGGIGALVRLKSLQGDKLEVSLKNNVVSVNKEPVAEPDIMATNGVVHVITNVLQPPANRPQERGDELADSALEIFKQASAFSRASQRSVRLAPVYQKLLERMKH

SEQ ID NO: 123 - DNA, 1205 bp, Homo sapiens
ccagtcagcagagggacaggaatcattcggccactgttcagacgggagccacacccttctccaatccaagcctggccccagaagatcacaaagagccaaagaaactggcaggtgtccacgcgctccaggccagtgagttggttgtcacttactttttctgtggggaagaaattccataccggaggatgctgaaggctcagagcttgaccctgggccactttaaagagcagctcagcaaaaagggaaattataggtattacttcaaaaaagcaagcgatgagtttgcctgtggagcggtgtttgaggagatctgggaggatgagacggtgctcccgatgtatgaaggccggattctgggcaaagtggagcggatcgattgagccctgcggtctggctttggtgaactgttggagcccgaagctcttgtgaactgtcttggctgtgagcaactgcgacaaaacattttgaaggaaaattaaaccaatgaagaagacaaagtctaaggaagaatcggccagtgggccttcgggagggcggggggaggttgattttcatgattcatgagctgggtactgactgagataagaaaagcctgaactatttattaaaaacatgaccactcttggctattgaagatgctgcctgtatttgagagactgccatacataatatatgacttcctagggatctgaaatccataaactaagagaaactgtgtatagcttacctgaacaggaatccttactgatatttatagaacagttgatttcccccatccccagtttatggatatgctgctttaaacttggaagggggagacaggaagttttaattgttctgactaaacttaggagttgagctaggagtgcgttcatggtttcttcactaacagaggaattatgctttgcactacgtccctccaagtgaagacagactgttttagacagactttttaaaatggtgccctaccattgacacatgcagaaattggtgcgttttgtttttttttcctatgctgctctgttttgtcttaaaggtcttgaggattgaccatgttgcgtcatcatcaacattttgggggttgtgttggatgggatgatctgttgcagagggagaggcagggaaccctgctccttcgggccccaggttgatcctgtgactgaggctccccctcatgtagcctccccaggcccagggccctgagg

SEQ ID NO: 124 - DNA, 583 bp, Homo sapiens
ccaagaagcagtggccttattgcatcccaaaccacgcctcttgaccaggctgcctcccttgtggcagcaacggcacagctaattctactcacagtgcttttaagtgaaaatggtcgagaaagaggcaccaggaagccgtcctggcgcctggcagtccgtgggacgggatggttctggctgtttgagattctcaaaggagcgagcatgtcgtggacacacacagactatttttagattttcttttgccttttgcaaccaggaacagcaaatgcaaaaactctttgagagggtaggagggtgggaaggaaacaaccatgtcatttcagaagttagtttgtatatattattataatcttataattgttctcagaatcccttaacagttgtatttaacagaaattgtatattgtaatttaaaataattatataactgtatttgaaataagaattcagacatctgaggttttatttcatttttcaatagcacatatggaattttgcaaagatttaatctgccaagggccgactaagagaagttgtaaagtatgtattatttacatttaatagacttacagggataagg

SEQ ID NO: 125 - DNA, 783 bp, Homo sapiens
tcaaccatacatactgcttccactagctaataccaaatgcaggttctcagatccagacaaatggaggaaaagaacatttatgcttccgtttcagaaagccaagtcgtagttttggcccttcctttctctaaagtttattcccaaaaacaggtagcattcctgattgggcagagaagaggatattttcagcccacatctgctgcaggtatgtcattttctcccatcttcactgtgactagtaaagatctcaccacttctctttggaatttccaactttgcttgtgattgaatgtcacttcgtgaatttgtattatgtcagatcacttggcattgctcttccatatgcatcaagttgccaggcactgttgcgctgtcgggcccactggaatccacgggggtgaaacaaattcaattatgcttttacagatcctgctcaaaaaaggtttcaactgcttaaccaagtacagctcattcttccaccttcttactctgcaaccaaaccaagtgccccatactacaggtaggtgccgagaaattccgcagcagaaaatccaaaatcatttctgaaacctccttgctaacaaaagttctttttttctccaaacagcatataaaatgatcaagtcttgaaagagaaaagaagcaaagtagcaaatacatcaacaattcactatcagaaacacataaaatcccagagagagagaaggcagtatctctgaatcatggatggacttggaaagttcggaaggattccgagtgcttcctttcagaaagacaattctg

SEQ ID NO: 126 - DNA, 604 bp, Homo sapiens
cctgctagaatcactgccgctgtgctttcgtggaaatgacagttccttgttttttttgtttctgtttttgttttacattagtcattggaccacagccattcaggaactaccccctgccccacaaagaaatgaacagttgtagggagacccagcagcacctttcctccacacaccttcattttgaagttcgggtttttgtgttaaagttaatctgtacattctgtttgccattgttacttgtactatacatctgtatatagtgtacggcaaaagagtattaatccactatctctagtgcttgactttaaatcagtacagtacctgtacctgcacggtcacccgctccgtgtgtcgccctatattgagggctcaagctttcccttgttttttgaaaggggtttatgtataaatatattttatgcctttttattacaagtcttgtactcaatgacttttgtcatgacattttgttctacttatactgtaaattatgcattataaagagttcatttaaggaaaattacttggtacaataattattgtaattaavagatgtagcctttattaaaattttatatttttcaaaaaaaaaaaaaaaaaaaaa

SEQ ID NO: 127 - DNA, 417 bp, Homo sapiens
ctgagcctctgtcaccagagaaggctgaggccccaatggcacacctcagaaacctacaccccgaggctggacggctggactcctgagcacaagctccctctcgcaccctttgccagacagtttgtctccaatttcaaactgacctaaggctcttactcctggattttttgtttttaaaccttctcccagccagtcttcgggagggcatgattagagaagtgctcctttgctgatggaggaggggacctaaggaagaaggtggatcccaggtgcctcctctctaattgatcctccccacctagtttcctttgcctctcttccttctaccaggtcatgttttttactctctgccccttctgcctcctagcatttcaaaaactgtagagtgcaccccatagtggacatttttagtccagg

SEQ ID NO: 128 - DNA, 657 bp, Homo sapiens
ccacactgaaatgcagtttaatgtggaaacttttctaaatacatattgtagcatctttggacatcaacgtgtggcctgaaatttttattattgttccctcttctcctccattaaaaaaaaaatctccttgtggtatttagtcatttaccattaacacatattatggcttaaaaagggccatcccttccttttctgagctggagttcttcacgctcacctttgatgcatggccttagctggttactttgccttggtttggtcatgaacattggggttagtggcctggcaacttgaatgcatatggaaagaacaatgccaagtgatctgacataatacaaattccgaagtgacattcaatcacaagcaaagttggaaattccaaagagaagtggtgagatctttactagtcacagtgaagatgggagaaaatgacatacctgcagcagatgtgggctgaaaatatcctcttctctgcccaatcaggaatgctacctgtttttgggaataaactttagagaaaggaagggccaaaactacgacttggctttctgaaacggaagcataaatgttcttttcctccatttgtctggatctgagaacctgcatttggtattagctagtggaagcagtatgtatggttgaagtgcattgctgcag

SEQ ID NO: 129 - DNA, 1220 bp, Homo sapiens
cgcgtgctcggctcacaccaacaaggcaagccaaaggcgcccctccccagagggatccctaacgtgcccagcatgtagattctggactaacagacaacatacattcaccgctggtcacccagatcctcattcaaacccactgctggcacatccctttccttactttgccctgtgctaccagccacggaaggagcctctcttgttttttctataaaatgggtaggcaggagaaaagcaggtgccctaagattgctctaaggcccagcatgtggttacagttctctgacttgcagaacctgccaggtgtatggctacaagttatcctcgtgctgatctgtctcattactaagttaatggagaagacagaaaggtaaaaatcacgtgtagcaagaacaactcttatttcacaaactcaggtatgaaacgaaacgcctgtccttcatggaactgcttttagctcctgtcttttcaaaatggcagagggagttcctacacacactttttccctggaggccaaggtctaggggtagaaaggggaggggtggggctaccaggtagcagttgacaacccaaggtcagaggagtggccctcagtgtcatctgtccacagtgatacctgccaagatgaccactgacccacatctggtcttagtcattggtctcctcagatttctggggccacctgcaagccccattccattcctacagatctctcagccacctgtaagtcctttgtgaagatgtgggtgacacagggggacaggaaaacccatttctcaacccagatccatgtctccactgcttctactctgggttgggattcaggaagacaggcacagtcctctctgttcatagaaacacctgccagtgtcaaggattccagtcaggtgtctatcccaactggtcagggagagaagggcagacccattctcaaagaccaccatgtccaaggtctgacagctccccactggctgcccccacaggggctttaggctggtctgggtcatggggaagcgtccctcttatcgctggtctgtgttctcctggatttggtatctatgttggtacgactcctggccttttatctaaaggactttggcttttgtaaatcacaagccaataatagacttttttctccccctctgttttttgctgtgtcatctctgccttgagactgccttgagacagtgcttgccttgagagagtgagccaattaacag

SEQ ID NO: 130 - DNA, 1274 bp, Homo sapiens
ccatatgagtttgccatctccatggatgccatttcaatgccttcagggtaatcattctctccccaaagactgcccacggggtcatcactcctgtgacgaaatgagggctggattgaagatgttctgctgagcacccccctggtcatctttggggtctcagaagagccataatcatgaccattctcagcatctgaataatcaggttctctccaagtgcttggcaagttctgattgtcctcagcactgggatagtctggctccccaaaaaagggtggagagttaggttgaatgtcagcgcctggataatcaggctttcccagagagtctgcgtatggattgattctaaaacttgtatgttccagattctttctggatcctggatggttcaaattggctctgggtccaggatgatcagagttgctctgagctccagggtagtccggttctaaggagccaaaatgatctggatgtgttctggagcctgcatagtttccactgctgctggagcctgcaaaatcaggatttcgttgagatccagggtagtctggttgtctggatgatgctcggtggtagggatgactctgaaattcactataatctggctctggtagagaggtaggatggtctgggcttgttctagaggctgcagagtatgcattgcttctggtgccagaatagtctggattactcagagatctaggataatttggttctgccagagacccaggatagtctggacgtgttctggaggctacagagtatggattgctcctggtgccggggtaatctggattgttcagaggacctggaacatctggataaccttgagttttcaaatacccctgcgtacggttctgagaccctgaatagtcagggtaatctgggtcttcctcagaccagttattcctgtagtaggcagacatgttggtatggactcttcaccctggagtggtaaactgtcccagcatttgcaattactcagggatcttttttttttcacttttttgcccttattgttcttgctttgtcccaagtagatgcaaatgttgtgcaaaccaacttgatcttaagatgttgttaagaacactggagtcacgtgtccatgggtccttcaggctggcttttgatgggagctgggatgcagatgatttacggagggttataatctgtgatgctggtctgaagtctgaatattccaagttgctgactgcaggcagagcctcatgtcctcctggcgctcctgttgccgctgcttgcgctggccctcgggtcga

SEQ ID NO: 131 - DNA, 554 bp, Homo sapiens
  misc_feature 403: n = A,T,C or G
ctgtaattctgccttttctaccttcattccatccttcctctgcccagataaagkccagcagaaattcctcctttctacctctctgggactctgagacaggaaatcttcaaggaggagtttttccctccccactattcttattctcaacccccagaggaaccaaggctgctgtacccacctcagggacagaactccacactatagtgggaaagcttcagggacccctccttttagtgctcagggctcacctatgctactggtccttttggcaaaaaaggaaaatgatagagccagggttgcccctgatgtagcagccttactgtggaggggccaaagctggtgttcagagctcacccaaggagggaggtgataaggtgtcatgcgttctgctgaacccactggntggtatgaacatgaggcttggggtgagggaaaccaagtaggggttggagaaggagcagcacctttgtmacacctggctacccatagctagctttctgccctcaaaaactcagccttcaagggatccagcccacacacgccacaggcagcag

SEQ ID NO: 132 - DNA, 787 bp, Homo sapiens
ctggtcacccaactcttgtggaagaggggaattgagatcgagtactgaatatctggcagagaggctggaatccttcagccccagagcccagggaccactccagtagatgcagagaggggcctgcccaggggtcagggcagtgggtatcactggtgacatcaagaatatcagggctggggaggcatctttgtttcctggtgccctcctcaaagttgctgacactttggggacgggaaggggtagaagtagggctgctccttttggagctggagggaatagacctggagacagagttgaggcagtcgggctgtccaggttctaagcatcacagcttctgcactgggctctgaggagattctcagccagaggatcccagcctcctcctccctcaaatgtcagtccaagcaaataccaaagcaacgcatcgattttgtggaagtcaattagagatgtggggagctatcggagacaagcactattgtaccttttcacctccacacttgtcacaagcagggactgtctcctccccactttgcttgccacgcctgccatggcttgagctggggtgaggagtggtctttatcttctttgggagatcctgactggttgcgcacttgctaagggcaggaagtctggagggctgcaggaatggtgccgttgataaacaggtggacttataatcatcatgcactgcaattgtagaacatagtctcctgccttttctcatttgtataattgtctgggtcaatattctcccaatattgggaggggctctgcagccctccag

SEQ ID NO: 133 - DNA, 219 bp, Homo sapiens
  misc_feature 19, 191: n = A,T,C or G
tactgctctaagttttgtnaaatttttcatattttaatttcaagcttattttggagagataggaaggtcatttccatgtatgcataataatcctgcaaagtacaggtactttgtctaagaaacattggaagcaggttaaatgttttgtaaactttgaaatatatggtctaatgtttaagcagaattggaanagactaatatcggttaacaaataacaac

SEQ ID NO: 134 - DNA, 234 bp, Homo sapiens
gattttaaaaacatcatgactttgaactgaaaaacatacacgtttagcacacaaatattgtaatatgaatgaactccaactccatttgaaaacatgtgaatcaaagtacagttttagaagttagtaattcacatttaagcaagttagcgccttgctgaatacagcctttgtaaaaaagagacttagtgcatattttaatggtacattgtggttttgtaccatttggttgagttg

SEQ ID NO: 135 - DNA, 414 bp, Homo sapiens
ctccagcctggctatatccggtcccgctataacctgggcatcagctgcatcaacctcggggctcaccgggaggctgtggagcactttctggaggccctgaacatgcagaggaaaagccggggcccccggggtgaaggaggtgccatgtcggagaacatctggagcaccctgcgtttggcattgtctatgttaggccagagcgatgcctatggggcagccgacgcgcgggatctgtccaccctcctaactatgtttggcctgccccagtgacagtgggacgggctgccctgtgagtgtccacctggggattaaatatgtcttcaacaagggaggcctggcttctacaatggtttaggtaaaggggcctttgaagtagttctggccaggcttgcaatacacacaacacaagagcca

SEQ ID NO: 136 - DNA, 461 bp, Homo sapiens
gaagtgattaataggtttatttgcatatacacagagaagagtcagcattgttgggtgagaagaggcaggctgtgaggaggtaaggcttcagcagaggaaggcaccttgacagacaacacgagactcctattaaatcagcacagttgcaaacttcacctgcctcaagccaacagctcattgaactcatatgtcgattgagaatcatttacaaaaccaggagagaaacaatgggaagagcaacggtctctcatccctggacctgacactcaaaacattatgtacaggatgcaggaacaaaatctgtctgatcagtgccctctcctgctgggaaaaacacccatcacggaagaatttggggattaaatatgtcttcaacaagggaggcctggcttctacaatggtttaggtaaaggggcctttgaagtagttctggccaggcttgcaatacacacaacacaaga

SEQ ID NO: 137 - DNA, 269 bp, Homo sapiens
atagcaaatggacacaaattacaaatgtgtgtgcgtgggacgaagacatctttgaaggtcatgagtttgttagtttaacatcatatatttgtaatagtgaaacctgtactcaaaatataagcagcttgaaactggctttaccaatcttgaaatttgaccacaagtgtcttatatatgcagatctaatgtaaaatccagaacttggactccatcgttaaaattatttatgtgtaacattcaaatgtgtgcattaaatatgcttccacagt

SEQ ID NO: 138 - DNA, 452 bp, Homo sapiens
  misc_feature 414: n = A,T,C or G
ctccatgggaggcaaaatatagagaatttatggtgcccaactcttatgtaatcactggactaatcttccctggtaactatgcaacatttggacagaaaggcacacaaaaaagtttaaatatttcatgtgccaatctggaaaaaaataatttaaatcaacagaacagacagtacatctacacaaatgaggaaagcagaaaagatacctcacattcatttatctcaggtttcaaagtggcttcaatgctaaagtaaatgtattaacatttggaaaatacaagacaatttttttgtttgttttcaatttttttagctctatacaatgattacaacataagacaaaaaaaaaaaaaaaacacaaaaaacaaaacaaaaaaggagttcaggacttgttatcagtgtccaagtggctaanaactggttcccataacaagcattgaaagttaaggcccc

SEQ ID NO: 139 - DNA, 474 bp, Homo sapiens
tgtgcctcattgaggttacaattgaaacagatgtgagcacctgagagactttccctgattatattcctccacaaaccactgtaccatattaccttattttatcttcttgaaattcttattcattggcttgtttgttgtctctttgcattagatatatgtaagctccttggcataaatttgacattggtaggggactgacattctaacctggcccaggccctaggagagagataactccacaaagcagcacatactatcttaggttagcagggagctaactcaccatgtagcagatgaaaaaaaccaaacccagcactgtgcataaataccacttgccaagaagtcaggtcctcggcaaccgagaatcaacctcagcacaaacgcaggtggctgggctctgttcccccttagccaccacctcagcctctcccctcccctgccccaagtgcccaagagcttggctctctgtgcttt

SEQ ID NO: 140 - DNA, 487 bp, Homo sapiens
cttccctgcctcgtgttcctgagaaacggattaatagccctttatccccctgcaccctcctgcaggggatggcactttgagccctctggagccctccccttgctgagccttactctcttcagactttctgaatgtacagtgccgttggttgggatttggggactggaagggaccaaggacactgaccccaagctgtcctgcctagcgtccagcgtcttctaggagggtggggtctgcctgtcctggtgtggttggtttggccctgtttgctgtgactacccccccccctccccgaaccgagggacggctgcctttgtctctgcctcagatgccacctgccccgcccatgctccccatcagcagcatccagactttcaggaagggcagggccagccagtccagaaccgcatccctcagcagggactgataagccatctctcggagggccccctaatacccaagtggagtctggttcacaccctggggg

SEQ ID NO: 141 - DNA, 248 bp, Homo sapiens
  misc_feature 25: n = A,T,C or G
ttaaagatggggaaatgaggcctgnaaatagaaaagatttgcctagagtcacacacactgtcaggtcaggtagagtcaaaatcaggcaccccgactcacagactgcttcacattgccatcagagattgtcctgcaacaatattatgtttagttctactgcagaatgataactggatcttaccccctttgcctgatctggccacaaacttgtttttcaggtctttccattaggctctcttcagctaatt

SEQ ID NO: 142 - DNA, 173 bp, Homo sapiens
tactaagattgtccaagcctccctcttaaaactttctttccctttagaggaatcattacttcgtattaaaagtttctacttccttgtagaatatctacatccaatgggccatggcacaaaatttaagtctagaaagaatcttaaaggctcatcttatagtaaccagaggcagg

SEQ ID NO: 143 - DNA, 511 bp, Homo sapiens
  misc_feature 26: n = A,T,C or G
cctcgtcagaggggtggttcctggtnacctgtactccacggacctcggtgaagcaaaagcttcagggcagagggaatgaggcaacccagtggcagccccgctgggccccgtggctcctgctctcctattggacgtagaggcaggggagagacttctctatacaaatattctcatcacagaagggatgatccttgctgctctgccgtagggtttttgatgctgagctatgctgcacatgacgttaacctaaagaacttggactgagcttttaaaaaaggacagcaaacaattttataatccttaaagtgtaatagacggttacactagtgcagggtattggggaggctctttgggtgtggaggctgtcacttgtatttattgtgactctaaatctttgatagtaaaacaaatgtaaaaagaaatgtttgccaccagatgggaatagaagttccaataagcaggctggaatgggtggctatacgttgtatcacgaggaagttttagactctga

SEQ ID NO: 144 - DNA, 190 bp, Homo sapiens
cattcttctgtcacatgccaattcagttgtcaatcccattgtctatgcttaccggaaccgagacttccgctacacttttcacaaaattatctccaggtatcttctctgccaagcagatgtcaagagtgggaatggtcaggctggggtacagcctgctctcggtgtgggcctatgatctaggctctcgcct

SEQ ID NO: 145 - DNA, 169 bp, Homo sapiens
gatgtggttatctcctcagatggccagtttgccctctcaggctcctgggatggaaccctgcgcctctgggatctcacaacgggcaccaccacgaggcgatttgtgggccataccaaggatgtgctgagtgtggccttctcctctgacaaccggcagattgtctctggat

SEQ ID NO: 146 - DNA, 511 bp, Homo sapiens
atctagagaagatttgggaaacacatgatagctatggttaaatacttaacagggcaatcacagggaagatgactagatttcctaacatccatgagtgaaatttatagaagtatactctctgacttgatataaaggaagattttaaaaaacatgactgttcaggagtgttcaagtagggtcagatgaccagtgattgggaatacttcgtaagcaggagcaagtaagatctgagccactgttctatcggtagggtgtctgtggtattccttggtcaaagaagtactctaagcaacttcagtctcacgaattactatcaccctcgtgggcatacatgatggttaccctaaagaggaagtttcagaaggcagtaatattggatcctggaatagtcagacaggagccttcatgcagatacccttttcagttctccatacacccattcacaagtggtcacaaaaacacccagtacctttacttggctttacccacttaacaatatgctcaatatgag

SEQ ID NO: 147 - DNA, 421 bp, Homo sapiens
  misc_feature 387: n = A,T,C or G
gaccagttgagttcttcctggctattgtataatccacagccacactgtgaaagcaaatctggccagttagcaacacagggagaatctgcctgaactgaccaaaggtgtccatacttcatgtcagtgagaatttcacctccatcatgttctaaagagccaacaacagattctagggcactgcaaaatgcttcagcaattaattgaagttctgtttgagtacattcatcatctttgagaatgctttctgggtcgttgtgagtcttgtgtctgatatatgcagccaaatgagtttcagtacagccacctcccaacaaagcccatggttccttgagtgttaactgcaggacatgcagtgccgtctgacacgtgagcttcagctcatcccangcagtgtcatttctgttgcagagaagccaagctg

SEQ ID NO: 148 - DNA, 237 bp, Homo sapiens
acacaccactgttggccttccatctgggttaagtcaactgtgagtagaaaccgaagataacagttttgtattcataatggccttttcatactccaagtacttttgagcacagagcctcttgcttctgacctggcacttggaacacagatatatatatcttttgttctgtccctgggaaactgatatttgtgtaagacaaccaccagatattttctctaataaaatcttctaaaatta

SEQ ID NO: 149 - DNA, 168 bp, Homo sapiens
agagaaagttaaagtgcaataatgtttgaagacaataagtggtggtgtatcttgtttctaataagataaacttttttgtctttgctttatcttattagggagttgtatgtcagtgtataaaacatactgtgtggtataacaggcttaataaattctttaaaaggagag

SEQ ID NO: 150 - DNA, 68 bp, Homo sapiens
  misc_feature 22: n = A,T,C or G
ggtggggtttggcagagatgantttaagtgctgtggccagaagcggggggggggtttggtggaaattt

SEQ ID NO: 151 - DNA, 421 bp, Homo sapiens
aggtgacacgtattcgggatgaaagtataatagtcattccttcaacccttgcatttatggactctggaaatcgaagatccacagtgagtaaagatgttcgtccaaagacaaaaaatagaaacagctcaacaaagcgagagacaaaaaaacaaaatggcactgtggctctgcctttgaagtctgggctccagcagagggctgatcttcccacaggagacgagacggcctatgacactctccagaactgttgtcagtgccgaattttacttcccttgcccattctaaatgagcaccaggagaagtgccagaggttagctcaccaaaagaaactccagtggggctggtgagatggctcagcgggtaagagcacccgactgctcttccgaaggtccggagttcaaatcccagcaaccacatggtg

SEQ ID NO: 152 - DNA, 507 bp, Homo sapiens
  misc_feature 12, 31, 37, 58, 95, 102, 130, 151, 155, 211, 230, 244, 253,274, 288, 318, 322, 343, 355, 376, 395, 446, 449, 453, 470,475, 482, 484, 488, 497: n = A,T,C or G
gaattcggcacnagctcgtgccgccagggtnggtccnttttttgctccgcctcgccangacttcctacagctatcgccagtcgtcggccacgtcntccttcngaggcctgggcggcggctccgtgcgttntgggccgggggtcgcctttcnctcncccagcattcacgggggctccggcggccgcggcgtatccgtgtcctccgcccgctntgtgtcctcgtcctcctcnggggcctacggctngctgctacngcggcttcctgaccgcttccnacgggctgctggcnggcaacgagaagctaaccatgcagaacctnaacnaccgcctggcctcctacctgnacaaggtgcgcnccctgtaggcggccaacggcnagctagaggtgaagatccnctactgggtaccagaagcaggggcctgggccctgcccgactacagccactnctncacnaccatgcagtacctgcnggganaagattntngggngccaccatngagaactgca

SEQ ID NO: 153 - DNA, 513 bp, Homo sapiens
gaattcggcacgaggtggctcagatgtccactactgggagtatggtcgaattgggaattttattgtgaaaaagcccatggtgctgggacatgaagcttcgggaacagtcgaaaaagtgggatcatcggtaaagcacctaaaaccaggtgatcgtgttgccatcgagcctggtgctccccgagaaaatgatgaattctgcaagatgggccgatacaatctgtcaccttccatcttcttctgtgccgcgccccccgatgacgggaacctctgccggttctataagcacaatgcagccttttgttacaagcttcctgacaatgtcacctttgaggaaggcgccctgatcgagccactttctgtggggatccatgcctgcaggagaggcggagttaccctgggacacaaggtccttgtgtgtggagctgggccaatcgggatggtcactttgctcgtggccaaagcaatgggagcagctcaagtagtggtgactgatctgtctgctacccgattgtc

SEQ ID NO: 154 - DNA, 507 bp, Homo sapiens
  misc_feature 26: n = A,T,C or G
ggcacgagctcgtgccgaattcggcncgagcagacacaatggtaagaatggtgcctgtcctgctgtctctgctgctgcttctgggtcctgctgtcccccaggagaaccaagatggtcgttactctctgacctatatctacactgggctgtccaagcatgttgaagacgtccccgcgtttcaggcccttggctcactcaatgacctccagttctttagatacaacagtaaagacaggaagtctcagcccatgggactctggagacaggtggaaggaatggaggattggaagcaggacagccaacttcagaaggccagggaggacatctttatggagaccctgaaagacatcgtggagtattacaacgacagtaacgggtctcacgtattgcagggaaggtttggttgtgagatcgagaataacagaagcagcggagcattctggaaatattactatgatggaaaggactacattgaattcaacaaagaaatcccagcctgggtcccct

SEQ ID NO: 155 - DNA, 507 bp, Homo sapiens
  misc_feature 27: n = A,T,C or G
ggcacgaggagacctaagggctgagtntcgggaacaggagaaagctctgttggccctccagcagcagtgtgctgagcaggcacaggagcatgaggtggagaccagggccctgcaggacagctggctgcaggcccaggcagtgctcaaggaacgggaccaggagctggaagctctgcgggcagaaagtcagtcctcccggcatcaggaggaggctgcccgggcccgggctgaggctctgcaggaggcccttggcaaggctcatgctgccctgcaggggaaagagcagcatctcctcgagcaggcagaattgagccgcagtctggaggccagcactgcaaccctgcaagcctccctggatgcctgccaggcacacagtcggcagctggaggaggctctgaggatacaagaaggtgagatccaggaccaggatctccgataccaggaggatgtgcagcagctgcagcaggcacttgcccagagggatgaagagctgagacatcagcagga

SEQ ID NO: 156 - DNA, 509 bp, Homo sapiens
  misc_feature 26: n = A,T,C or G
ggcacgaggacagagagaaccctgtngaaagagcgttaccaggaggtcctggacaaacagaggcaagtggagaatcagctccaagtgcaattaaagcagcttcagcaaaggagagaagaggaaatgaagaatcaccaggagatattaaaggctattcaggatgtgacaataaagcgggaagaaacaaagaagaagatagagaaagagaagaaggagtttttgcagaaggagcaggatctgaaagctgaaattgagaagctttgtgagaagggcagaagagaggtgtgggaaatggaactggatagactcaagaatcaggatggcgaaataaataggaacattatggaagagactgaacgggcctggaaggcagagatcttatcactagagagccggaaagagttactggtactgaaactagaagaagcagaaaaagaggcagaattgcaccttacttacctcaagtcaactcccccaacactggagacagttcgttccaaacaggagtg

SEQ ID NO: 157 - DNA, 507 bp, Homo sapiens
ggcacgagggcagccctcctaccggcgcacgtggtgccgccgctgctgcctcccgctcgccctgaacccagtgcctgcagccatggctcccggccagctcgccttatttagtgtctctgacaaaaccggccttgtggaatttgcaagaaacctgaccgctcttggtttgaatctggtcgcttccggagggactgcaaaagctctcagggatgctggtctggcagtcagagatgtctctgagttgacgggatttcctgaaatgttggggggacgtgtgaaaactttgcatcctgcagtccatgctggaatcctagctcgtaatattccagaagataatgctgacatggccagacttgatttcaatcttataagagttgttgcctgcaatctctatccctttgtaaagacagtggcttctccaggtgtaagtgttgaggaggctgtggagcaaattgacattggtggagtaaccttactgagagctgcagccaaaaaccacgctcgagt

SEQ ID NO: 158 - DNA, 507 bp, Homo sapiens
  misc_feature 27, 428, 448, 449, 456, 462, 490, 492, 497, 498, 502, 503: n = A,T,C or G
ggcacgagtcgagctgtgcctattcgngtcaatccaagagtgagtaatgtgaagtctgtctacaaaacccacattgatgtcattcattatcggaaaacggatgcaaaacgtctgcatggccttgatgaagaagcagaacagaaacttttttcagagaaacgtgtggaattgcttaaggaactttccaggaaaccagacatttatgagaggcttgcttcagccttggctccaagcatttatgaacatgaagatataaagaagggaattttgcttcagctctttggcgggacaaggaaggattttagtcacactggaaggggcaaatttcgggctgagatcaacatcttgctgtgtggcgaccctggtaccagcaagtcccagctgctgcagtacgtgtacaacctcgtccccaggggccagtacacgtntgggaagggctccagtgcanntggcctnactgcntacgtaatgaaagaccctgagacaaggnanctggnnctgnnacag

SEQ ID NO: 159 - DNA, 508 bp, Homo sapiens
  misc_feature 6, 8, 25, 26: n = A,T,C or G
ggcacnanaaaccaggattatggtnnggatccaaagattgctaatgcaataatgaaggcagcagatgaggtagctgaaggtaaattaaatgatcattttcctctcgtggtatggcagactggatcaggaactcagacaaatatgaatgtaaatgaagtcattagcaatagagcaattgaaatgttaggaggtgaacttggcagcaagatacctgtgcatcccaacgatcatgttaataaaagccagagctcaaatgatacttttcccacagcaatgcacattgctgctgcaatagaagttcatgaagtactgttaccaggactacagaagttacatgatgctcttgatgcaaaatccaaagagtttgcacagatcatcaagattggacgtactcatactcaggatgctgttccacttactcttgggcaggaatttagtggttatgttcaacaagtaaaatatgcaatgacaagaataaaagctgccatgccaagaatctatgagctcg

SEQ ID NO: 160 - DNA, 508 bp, Homo sapiens
  misc_feature 27: n = A,T,C or G
ggcacgagcttggagcaaagtcatctnaaggaattagaggacacacttcaggttaggcacatacaagagtttgagaaggttatgacagaccacagagtttctttggaggaattaaaaaaggaaaaccaacaaataattaatcaaatacaagaatctcatgctgaaattatccaggaaaaagaaaaacagttacaggaattaaaactcaaggtttctgatttgtcagacacgagatgcaagttagaggttgaacttgcgttgaaggaagcagaaactgatgaaataaaaattttgctggaagaaagcagagcccagcagaaggagaccttgaaatctcttcttgaacaagagacagaaaatttgagaacagaaattagtaaactcaaccaaaagattcaggataataatgaaaattatcaggtgggcttagcagagctaagaactttaatgacaattgaaaaagatcagtgtatttccgagttaattagtagacatgaagaagaatcta

SEQ ID NO: 161 - DNA, 507 bp, Homo sapiens
ggcacgagcgctaccggcgcctcctctgcggccactgagccggagccggcctgagcagcgctctcggttgcagtacccactggaaggacttaggcgctcgcgtggacaccgcaagcccctcagtagcctcggcccaagaggcctgctttccactcgctagccccgccgggggtccgtgtcctgtctcggtggccggacccgggcccgagcccgagcagtagccggcgccatgtcggtggtgggcatagacctgggcttccagagctgctacgtcgctgtggcccgcgccggcggcatcgagactatcgctaatgagtatagcgaccgctgcacgccggcttgcatttcttttggtcctaagaatcgttcaattggagcagcagctaaaagccaggtaatttctaatgcaaagaacacagtccaaggatttaaaagattccatggccgagcattctctgatccatttgtggaggcagaaaaatctaaccttgcatatgatattgtgca

SEQ ID NO: 162 - DNA, 507 bp, Homo sapiens
  misc_feature 27: n = A,T,C or G
ggcacgagcagctgtgcaccgacatgntctcagtgtcctgagtaagaccaaagaagctggcaagatcctctctaataatcccagcaagggactggccctgggaattgccaaagcctgggagctctacggctcacccaatgctctggtgctactgattgctcaagagaaggaaagaaacatatttgaccagcgtgccatagagaatgagctactggccaggaacatccatgtgatccgacgaacatttgaagatatctctgaaaaggggtctctggaccaagaccgaaggctgtttgtggatggccaggaaattgctgtggtttacttccgggatggctacatgcctcgtcagtacagtctacagaattgggaagcacgtctactgctggagaggtcacatgctgccaagtgcccagacattgccacccagctggctgggactaagaaggtgcagcaggagctaagcaggccgggcatgctggagatgttgctccctggccagcctga

SEQ ID NO: 163 - DNA, 460 bp, Homo sapiens
ggcacgagaaataactttatttcattgtgggtcgcggttcttgtttgtggatcgctgtgatcgtcacttgacaatgcagatcttcgtgaagactctgactggtaagaccatcaccctcgaggttgagcccagtgacaccatcgagaatgtcaaggcaaagatccaagataaggaaggcatccctcctgaccagcagaggctgatctttgctggaaaacagctggaagatgggcgcaccctgtctgactacaacatccagaaagagtccaccctgcacctggtgctccgtctcagaggtgggatgcaaatcttcgtgaagacactcactggcaagaccatcacccttgaggtggagcccagtgacaccatcgagaacgtcaaagcaaagatccaggacaaggaaggcattcctcctgaccagcagaggttgatctttgccggaaagcagctggaagatggg

SEQ ID NO: 164 - DNA, 462 bp, Homo sapiens
ggcacgagccggatctcattgccacgcgcccccgacgaccgcccgacgtgcattcccgattccttttggttccaagtccaatatggcaactctaaaggatcagctgatttataatcttctaaaggaagaacagaccccccagaataagattacagttgttggggttggtgctgttggcatggcctgtgccatcagtatcttaatgaaggacttggcagatgaacttgctcttgttgatgtcatcgaagacaaattgaagggagagatgatggatctccaacatggcagccttttccttagaacaccaaagattgtctctggcaaagactataatgtaactgcaaactccaagctggtcattatcacggctggggcacgtcagcaagagggagaaagccgtcttaatttggtccagcgtaacgtgaacatctttaaattcatcattcctaatgttgtaaaata

SEQ ID NO: 165 - DNA, 462 bp, Homo sapiens
ggcacgaggaagccatgagcagcaaagtctctcgcgacaccctgtacgaggcggtgcgggaagtcctgcacgggaaccagcgcaagcgccgcaagttcctggagacggtggagttgcagatcagcttgaagaactatgatccccagaaggacaagcgcttctcgggcaccgtcaggcttaagtccactccccgccctaagttctctgtgtgtgtcctgggggaccagcagcactgtgacgaggctaaggccgtggatatcccccacatggacatcgaggcgctgaaaaaactcaacaagaataaaaaactggtcaagaagctggccaagaagtatgatgcgtttttggcctcagagtctctgatcaagcagattccacgaatcctcggcccaggtttaaataaggcaggaaagttcccttccctgctcacacacaacgaaaacatggtggccaaagtggatg

SEQ ID NO: 166 - DNA, 459 bp, Homo sapiens
  misc_feature 19, 27, 40, 42, 43, 46, 63, 65, 70, 85, 87, 94, 102, 103,106, 144, 149, 166, 202, 209, 215, 216, 221, 310, 315, 332,358, 366, 368, 379, 382, 384, 410, 424, 429, 434: n = A,T,C or G
ggcacgagagggacctgtntgaatggntccactagggttnanntgnctcttacttttaaccantnaaatngacctgcccgtgaanangcgggcntgacacannaanacgagaagaccctatggagctttaatttattaatgcanacagnacctaacaaacccacangtcctaaactaccaagcctgcattaaaaatttcggntggggcnacctcnnagcanaacccaacctccgagcaactcatgctaagacttcaccagtcaaagctgaactactatactcaattgatccaataacttgaccaacagancaagntaccctagggataacancacaatcctattctagaccccttatnaccaatangntttacacctcnatngnggaaccaggacatccgatggggcagncgttattaaagttngttgntaacnataaagtctacgtgatctgagttag

SEQ ID NO: 167 - DNA, 464 bp, Homo sapiens
  misc_feature 17, 20, 22, 28, 33, 40, 45, 46, 55, 82, 99, 108, 115, 132,150, 171, 182, 192, 244, 252, 276, 306, 313, 318, 320, 332,352, 370, 376, 377, 378, 393, 395, 399, 403, 420, 434, 435,455, 456: n = A,T,C or G
gaattgggaccaacganaancntgcggntcttnttttgcntccanngcccagctnattgctcagacacacatggggaaggtnaaggtcgggagtcaacngatttggtngtattgnagcgtttggtcaccagngctgcttttaactctggnaaagtggatattgttgtcatnaatgacccctncattgacctnaactacatggtttacatgttccaatatgattccacccatggcaaattccatngcaccgtnaaggctgagaacgggaagcttgtnatcaatggaaatcccatcaccatctttcangaacganatccntncaaaaatcaaanttgggggcgatgcttggccncttgaagtaccgttcaangggaannnccccactttggccgntntttncaancccaccccaatttgggnaaaaaaaaaggggnntttgggggggggccttttanntttttttt

SEQ ID NO: 168 - DNA, 462 bp, Homo sapiens
  misc_feature 10, 11, 12, 18, 42, 47, 83, 84, 88, 91, 100, 123, 172, 174,177, 189, 192, 196, 199, 204, 210, 216, 218, 228, 231, 232,236, 240, 249, 251, 259, 263, 264, 269, 272, 275, 278, 280,287, 292, 294, 305, 310, 328, 329, 335, 345, 349, 357: n = A,T,C or G
  misc_feature 375, 377, 446, 455: n = A,T,C or G
ggcacgaggnnnaacctncggggctggggcagcacgccttgngcaancctgcactgcactgaagacccggtgccggaagccgnnggcngcnacatgcagnaactgaaccagctgggcgcgcancagttctcagacctgacagaggtgcttttacacttcctaactgatccanantangtggaaatattnttngttnatntcatntgaatnatccancnccaatcatancanntttnattncctcataancnttgagaanagcnnccttntgnttncananggtgctntgaanangagtctcacangcaancaggtccaagcggatttnntaactntgggtcttantgangagaaagncacttacttttctgaaancnggaagcagaatgctcccacccttgctcgatgggccatacgtcaagactctgatgattaaccagctttanatatggacnggaaatt

SEQ ID NO: 169 - DNA, 460 bp, Homo sapiens
  misc_feature 20, 64, 69, 71, 73, 91, 109, 113, 151, 237, 238, 241, 255,266, 269, 280, 290, 302, 312, 318, 329, 334, 355, 357, 359,376, 379, 380, 382, 397, 409, 410, 415, 422, 442, 446, 452: n = A,T,C or G
ggcacgagggacagcagacnagacagtcacagcagccttgacaaaacgttcctggaactcaagntcttntncncaaaggaggacagagcanacagcagagaccatggantctncctcggcccctccccacagatggtgcatcccctggcanaggctcctgctcacagcctcacttctaaccttctggaacccgcccaccactgccaagctcactattgaatccacgccgttcaatgnntcntaggggaaggaggngctttctactnttncacaatctganccccttcttntttggttactancatggctctncatgtnaaaatactggnatggntaacctgtcaaatttataggnantntgctaattgggaaactnccnntngtctaccccaggggncccagattcctnngttcncataacnattaatttaacccctaatgncaancccttngttaaaga

SEQ ID NO: 170 - DNA, 508 bp, Homo sapiens
  misc_feature 27: n = A,T,C or G
ggcacgagggggatttttaggtggtcnggtgtggtatcaggaataatgtgggaggccagattgaagtccaggccaggaacaatggtaattgtgggacttaagaaagtgtgagtacagctgaatgagccggggagcagaaagtatatgcgtcaggtatgaggaagaaaatagattttggaagttatgagaaatgtagagagtgagttgagcatagtttgtgattttgagggcctctaacagtattaaagcagcggcagcggctgcacacagacatgatggctaggctaaaacaggaaggtcaagttgtttggacagaaaggctacagggtgcagtcctggctcttgtgtaagaattctgaccacactaaccatgcctaggaaggaaaggagttgttcttttgtaagggattgaggtttgggagattaatcggacacgatcagcagggagagcacctgtgtttttatgagaattatgctgagataggtaacagatgaggatgaaatttgg

SEQ ID NO: 171 - DNA, 507 bp, Homo sapiens
  misc_feature 26: n = A,T,C or G
ggcacgagaccagccactagcgcagnctcgagcgatggcctatgtccccgcaccgggctaccagcccacctacaacccgacgctgccttactaccagcccatcccgggcgggctcaacgtgggaatgtctgtttacatccaaggagtggccagcgagcacatgaagcggttcttcgtgaactttgtggttgggcaggatccgggctcagacgtcgccttccacttcaatccgcggtttgacggctgggacaaggtggtcttcaacacgttgcagggcgggaagtggggcagcgaggagaggaagaggagcatgcccttcaaaaagggtgccgcctttgagctggtcttcatagtcctggctgagcactacaaggtggtggtaaatggaaatcccttctatgagtacgggcaccggcttcccctacagatggtcacccacctgcaagtggatggggatctgcaacttcaatcaatcaacttcatcggaggccagcccctccggcccca

SEQ ID NO: 172 - DNA, 409 bp, Homo sapiens
ggcacgagctggagtgtctgctgccaccccctcgtcctctgcagaaatgtctgtcacctacgatgactctgtgggagtggaagtgtccagcgacagcttctgggaggttgggaactacaaacggactgtgaagcggattgacgatggccaccgcctgtgtggtgacctcatgaactgtctgcatgagcgggcacgcatcgagaaggcgtatgcacagcagctcactgagtgggcccgacgctggaggcagctggtagagaagggaccacagtatgggaccgtggagaaggcctggatagctgtcatgtctgaagcagagagggtgagtgaactgcacctggaagtgaaggcatcactgatgaatgaagactttgagaagatcaagaactggcagaaggaagcctttcac

SEQ ID NO: 173 - DNA, 409 bp, Homo sapiens
ggcacgagggcagctagaggaagagtccaaggccaagaacgcactggcccacgccctgcagtcagctcgccatgactgtgacctgctgcgggaacagtatgaagaggagcaggaagccaaggctgagctgcagagggccatgtccaaggccaacagcgaggtagcccagtggaggacgaaatatgagacggatgccatccagcgcacagaggagctggaagaggccaagaagaagctggctcagcgtctgcaggatgctgaggaacatgtagaagctgtgaattccaaatgcgcttctcttgaaaagacgaagcagcgacttcagaatgaagtggaggacctcatgattgacgtggagaggtctaatgctgcctgcgctgcgcttgataagaagcagaggaactttgac

SEQ ID NO: 174 - DNA, 407 bp, Homo sapiens
ggcacgagccggggcggggcgcggcgctccggctcgaggcattcggagctgcgggagccgggctggcaggagcaggatggcggcggcggcggctgcaggcgaggcgcgccgggtgctggtgtacggcggcaggggcgctctgggttctcgatgcgtgcaggcttttcgggcccgcaactggtgggttgccagcgttgatgtggtggagaatgaagaggccagcgctagcatcattgttaaaatgacagactcgttcactgagcaggctgaccaggtgactgctgaggttggaaagctcttgggtgaagagaaggtggatgcaattctttgcgttgctggaggatgggccgggggcaatgccaaatccaagtctctctttaagaactgtgacctgatgtggaagcaga

SEQ ID NO: 175 - DNA, 407 bp, Homo sapiens
ggcacgagcttgcccgtcggtcgctagctcgctcggtgcgcgtcgtcccgctccatggcgctcttcgtgcggctgctggctctcgccctggctctggccctgggccccgccgcgaccctggcgggtcccgccaagtcgccctaccagctggtgctgcagcacagcaggctccggggccgccagcacggccccaacgtgtgtgctgtgcagaaggttattggcactaataggaagtacttcaccaactgcaagcagtggtaccaaaggaaaatctgtggcaaatcaacagtcatcagctacgagtgctgtcctggatatgaaaaggtccctggggagaagggctgtccagcagccctaccactctcaaacctttacgagaccctgggagtcgttggatccaccaccac

SEQ ID NO: 176 - DNA, 409 bp, Homo sapiens
ggcacgagtggtgccaaaacgggaccatgccctcctggaggagcagagcaagcagcagtccaacgagcacctgcgccgccagttcgccagccaggccaatgttgtggggccctggatccagaccaagatggaggagatcgggcgcatctccattgagatgaacgggaccctggaggaccagctgagccacctgaagcagtatgaacgcagcatcgtggactacaagcccaacctggacctgctggagcagcagcaccagctcatccaggaggccctcatcttcgacaacaagcacaccaactataccatggagcacatccgcgtgggctgggagcagctgctcaccaccattgcccgcaccatcaacgaggtggagaaccagatcctcacccgcgacgccaagggcatc

SEQ ID NO: 177 - DNA, 408 bp, Homo sapiens
ggcacgaggtccaggtaactgcaaaaacaatggctcagcatgaagaactgatgaagaaaactgaaacaatgaatgtagttatggagaccaataaaatgctaagagaagagaaggagcaggtttcaaaaatggcatcagtccgtcagcatttggaagaaacaacacagaaagcagaatcacagttgttggagtgtaaagcatcttgggaggaaagagagagaatgttaaaggatgaagtttccaaatgtgtatgtcgctgtgaagatctggagaaacaaaacagattacttcatgatcagatcgaaaaattaagtgacaaggtcgttgcctctgtgaaggaaggtgtacaaggtccactgaatgtatctctcagtgaagaaggaaaatctcaagaacaaattttggaaa

SEQ ID NO: 178 - DNA, 92 bp, Homo sapiens
ggcacgagaagaaattaagagctaaagacaaggagaatgaaaatatggttgcaaagctgaacaaaaaagttaaagagctagaagaggagatg

SEQ ID NO: 179 - DNA, 411 bp, Homo sapiens
ggcacgaggagacacgccacctataccacagttctcagaatgaattagctaagttggaatcagaacttaagagtctcaaagaccagttgactgatttaagtaactctttagaaaaatgtaaggaacaaaaaggaaacttggaagggatcataaggcagcaagaggctgatattcaaaattctaagttcagttatgaacaactggagactgatcttcaggcctccagagaactgaccagtaggctgcatgaagaaataaatatgaaagagcaaaagattataagcctgctttctggcaaggaagaggcaatccaagtagctattgctgaactgcgtcagcaacatgataaagaaattaaagagctggaaaacctgctgtcccaggaggaagaggagaatattgttttagaag

SEQ ID NO: 180 - DNA, 411 bp, Homo sapiens
ggcacgaggttgttcggagcgggcgagcggagttagcagggctttactgcagagcgcgccgggcactccagcgaccgtggggatcagcgtaggtgagctgtggccttttgcgaggtgctgcagccatagctacgtgcgttcgctacgaggattgagcgtctccacccatcttctgtgcttcaccatctacataatgaatcccagtatgaagcagaaacaagaagaaatcaaagagaatataaagactagttctgtcccaagaagaactctgaagatgattcagccttctgcatctggatctcttgttggaagagaaaatgagctgtccgcaggcttgtccaaaaggaaacatcggaatgaccacttaacatctacaacttccagccctggggttattgtcccagaatctag

SEQ ID NO: 181 - DNA, 411 bp, Homo sapiens
ggcacgaggcgggacagggcgaagcggcctgcgcccacggagcgcgcgacactgcccggaagggaccgccacccttgccccctcagctgcccactcgtgatttccagcggcctccgcgcgcgcacgatgccctcggccaccagccacagcgggagcggcagcaagtcgtccggaccgccaccgccgtcgggttcctccgggagtgaggcggccgcgggagccggggccgccgcgccggcttctcagcaccccgcaaccggcaccggcgctgtccagaccgaggccatgaagcagattctcggggtgatcgacaagaaacttcggaacctggagaagaaaaagggtaagcttgatgattaccaggaacgaatgaacaaaggggaaaggcttaatcaagatcagctggatgcc

SEQ ID NO: 182 - DNA, 411 bp, Homo sapiens
ggcacgagccgacatggagctgttcctcgcgggccgccgggtgctggtcaccggggcaggcaaaggtatagggcgcggcacggtccaggcgctgcacgcgacgggcgcgcgggtggtggctgtgagccggactcaggcggatcttgacagccttgtccgcgagtgcccggggatagaacccgtgtgcgtggacctgggtgactgggaggccaccgagcgggcgctgggcagcgtgggccccgtggacctgctggtgaacaacgccgctgtcgccctgctgcagcccttcctggaggtcaccaaggaggcctttgacagatcctttgaggtgaacctgcgtgcggtcatccaggtgtcgcagattgtggccaggggcttaatagcccggggagtcccaggggccatcgtgaa

SEQ ID NO: 183 - DNA, 409 bp, Homo sapiens
ggcacgagcctacactctggccagagataccacagtcaaacctggagccaaaaaggacacaaaggactctcgacccaaactgccccagaccctctccagaggttggggtgaccaactcatctggactcagacatatgaagaagctctatataaatccaagacaagcaacaaacccttgatgattattcatcacttggatgagtgcccacacagtcaagctttaaagaaagtgtttgctgaaaataaagaaatccagaaattggcagagcagtttgtcctcctcaatctggtttatgaaacaactgacaaacacctttctcctgatggccagtatgtccccaggattatgtttgttgacccatctctgacagttagagccgatatcactggaagatattcaaatcgtctc

SEQ ID NO: 184 - DNA, 410 bp, Homo sapiens
ggcacgaggtcattccagcaccaacaggatccaagccagattgattgggctgcattggcccaagcttggattgcccaaagagaagcttcaggacagcaaagcatggtagaacaaccaccaggaatgatgccaaatggacaagatatgtctacaatggaatctggtccaaacaatcatgggaatttccaaggggattcaaacttcaacagaatgtggcaaccagaatggggaatgcatcagcaacccccacacccccctccagatcagccatggatgccaccaacaccaggcccaatggacattgttcctccttctgaagacagcaacagtcaggacagtggggaatttgcccctgacaacaggcatatatttaaccagaacaatcacaactttggtggaccacccgataa

SEQ ID NO: 185 - DNA, 411 bp, Homo sapiens
  misc_feature 366: n = A,T,C or G
ggcacgagcacagatgtagttttctctgcgcgtgtgcgttttccctcctcccccgccctcagggtccacggccaccatggcgtattaggggcagcagtgcctgcggcagcattggcctttgcagcggcggcagcagcaccaggctctgcagcggcaacccccagcggcttaagccatggcgcttctcacggcattcagcagcagcgttgctgtaaccgacaaagacaccttcgaattaagcacattcctcgattccagcaaagcaccgcaacatgaccgaaatgagcttcctgagcagcgaggtgttggtgggggacttgatgtcccccttcgacccgtcgggtttgggggctgaagaaagcctangtctcttagatgattacctggaggtggccaagcacttcaaacctc

SEQ ID NO: 186 - DNA, 410 bp, Homo sapiens
ggcacgagcttctagtcccgccatggccgctctcacccgggacccccagttccagaagctgcagcaatggtaccgcgagcaccgctccgagctgaacctgcgccgcctcttcgatgccaacaaggaccgcttcaaccacttcagcttgaccctcaacaccaaccatgggcatatcctggtggattactccaagaacctggtgacggaggacgtgatgcggatgctggtggacttggccaagtccaggggcgtggaggccgcccgggagcggatgttcaatggtgagaagatcaactacaccgagggtcgagccgtgctgcacgtggctctgcggaaccggtcaaacacacccatcctggtagacggcaaggatgtgatgccagaggtcaacaaggttctggacaagatga

SEQ ID NO: 187 - DNA, 506 bp, Homo sapiens
ctttcgtggctcactccctttcctctgctgccgctcggtcacgcttgtgcccgaaggaggaaacagtgacagacctggagactgcagttctctatccttcacacagctctttcaccatgcctggatcacttcctttgaatgcagaagcttgctggccaaaagatgtgggaattgttgcccttgagatctattttccttctcaatatgttgatcaagcagagttggaaaaatatgatggtgtagatgctggaaagtataccattggcttgggccaggccaagatgggcttctgcacagatagagaagatattaactctctttgcatgactgtggttcagaatcttatggagagaaataacctttcctatgattgcattgggcggctggaagttggaacagagacaatcatcgacaaatcaaagtctgtgaagactaatttgatgcagctgtttgaagagtctgggaatacagatatagaaggaatcgacacaactaatgcatgctat

SEQ ID NO: 188 - DNA, 506 bp, Homo sapiens
gccacagaggcggcggagagatggccttcagcggttcccaggctccctacctgagtccagctgtccccttttctgggactattcaaggaggtctccaggacggacttcagatcactgtcaatgggaccgttctcagctccagtggaaccaggtttgctgtgaactttcagactggcttcagtggaaatgacattgccttccacttcaaccctcggtttgaagatggagggtacgtggtgtgcaacacgaggcagaacggaagctgggggcccgaggagaggaagacacacatgcctttccagaaggggatgccctttgacctctgcttcctggtgcagagctcagatttcaaggtgatggtgaacgggatcctcttcgtgcagtacttccaccgcgtgcccttccaccgtgtggacaccatctccgtcaatggctctgtgcagctgtcctacatcagcttccagcctcccggcgtgtggcctgccaacccggctcccattacccag

SEQ ID NO: 189 - DNA, 399 bp, Homo sapiens
ctggacaggagaagagcctggctgctgaaggcagggctgacacgaccacgggcagcattgctggagccccagaggatgaaagatcgcagagcacagccccccaggcaccagagtgcttcgaccctgccggaccggctgggctcgtgaggccgacatctggcctttcccagggcccaggaaaggaaaccttggaaagtgctctaatcgctctagactctgaaaaacccaagaaacttcgcttccacccaaagcagctgtacttctctgccaggcagggtgagctgcagaaggtgcttctcatgctggttgatggaattgatcccaacttcaaaatggagcaccaaagtaagcgttccccattacatgctgctgcggaggctggccacgtggacatctgcc

SEQ ID NO: 190 - DNA, 401 bp, Homo sapiens
cggcgacggtggtggtgactgagcggagcccggtgacaggatgttggtgttggtattaggagatctgcacatcccacaccggtgcaacagtttgccagctaaattcaaaaaactcctggtgccaggaaaaattcagcacattctctgcacaggaaacctttgcaccaaagagagttatgactatctcaagactctggctggtgatgttcatattgtgagaggagacttcgatgagaatctgaattatccagaacagaaagttgtgactgttggacagttcaaaattggtctgatccatggacatcaagttattccatggggagatatggccagcttagccctgttgcagaggcaatttgatgtggacattcttatctcgggacacacacacaaatttgaag

SEQ ID NO: 191 - DNA, 406 bp, Homo sapiens
tggcagcctaagccgtgggagggttccagtcgagaatgggaagatgaaagacttcagatggaacagaaataaatgccttttttgacaaacgcagcagtgcgtgcctctagcttgcaagagcgttactccccttcatagctttaaaaggttttcgcactgcgtgcagttagagtagctaaatcttgtgtgacgctccacaaacacttgtaagaattttgcagagaaagataaccgttgccacccaatgccccccacaggcattctactccccagtacctcttagggtgggagaaatggtgaagagttgttcctacaacttgctaacctagtggacagggtagtagattagcatcatccggatagatgtgaagaggacggctgtttggataataattaaggataaaat

SEQ ID NO: 192 - DNA, 316 bp, Homo sapiens
cccggggaggccctggtcataaaactttaaattttactagtgttacttaatgtatattctaaaaagagaatgcagtaactaatgccctaaatgtttgatctctgtttgtcattactttttcaaaattatttttttctgtaaagtataatatataaaacttcttgcttaaattgaatttctatattagtggttaattgcagtttattaaagggatcattatcagtaatttcatagcaactgttctagtgttttgtgtttttaaaacagaattaggaatttgagatatctgattatatttttcatatgaatcacagac

SEQ ID NO: 193 - DNA, 146 bp, Homo sapiens
gaaacatggactgccccttaaattttgactgtcctaaaaacctatttctgatttataatatgctgcctgataaagtgacactagatgtaccagctgagtgtttaatcttcccatcacagatcagatttgagcattaacaggtattt

SEQ ID NO: 194 - DNA, 405 bp, Homo sapiens
cggatgtgctcactgacattctactccaagtcggagatgcagatccactccaagtcacacaccgagaccaagccccacaagtgcccacattgctccaagaccttcgccaacagctcctacctggcccagcacatccgtatacactcaggggctaagccctacagttgtaacttctgtgagaaatccttccgccagctctcccaccttcagcagcacacccgaatccacactggtgatagaccatacaaatgtgcacacccaggctgtgagaaagccttcacacaactctccaatctgcagtcccacagacggcaacacaacaaagataaacccttcaagtgccacaactgtcatcgggcgtacacggatgcagcctcactagaggtgcacctgtctacgcacaca

SEQ ID NO: 195 - DNA, 421 bp, Homo sapiens
agaattcggcacgagctactccttgcgcgctggcactccgcagcctttaaggttcgcgcgggggccaggcaagagttagccatgaagagcctcaagtcccgcctgaggaggcaggacgtgcccggccccgcgtcgtctggcgccgccgccgccagcgcgcatgcagcagattggaataaatatgatgaccgattgatgaaagcagcagaaaggggggatgtagaaaaagtgacgtcaatccttgctaaaaagggggtcaatccaggcaaactagatgtggaaggcagatctgtcttccatgttgtgacctcaaaggggaatcttgagtgtttgaatgccatccttatacatggagttgatattacaaccagtgacactgcagggagaaatgctcttcacctggctgctaagtatggacatg

SEQ ID NO: 196 - DNA, 476 bp, Homo sapiens
agaattgatctatagatttaatgcaatgcctactaaaatcccagtacgattttttacaggcatagacaatagacatagccaaaacttattctaaaatacatatgaagatgcacaggccctagttatacaatcttgacaaagaagaataaagtgggaagaatctatttgattttaaggcttaccatgtaactacagtcatcaagagagtgtggtatcggcagacggtcagacatacagatcaatggaatgtaacagaggacccagaaataggcccacacagatatgctcaatggatatttgacaagcgtgcaaaacaattcaatggaagaataagctttcaaaaaaatggcgttggagcaaccggacatccataggaaaaaatgaacccatacctaaaccataaaccttatataaaaataaacacaaaatgaatcataggcttaaatgtaagctataaaacttttagagaaaaacac

SEQ ID NO: 197 - DNA, 503 bp, Homo sapiens
tagccctcggtgaagccccagaccacagctatgagtcccttcgtgtgacgtctgcgcagaaacatgttctgcatgtccagctcaaccggcccaacaagaggaatgccatgaacaaggtcttctggagagagatggtagagtgcttcaacaagatttcgagagacgctgactgtcgggcggtggtgatctctggtgcaggaaaaatgttcactgcaggtattgacctgatggacatggcttcggacatcctgcagcccaaaggagatgatgtggcccggatcagctggtacctccgtgacatcatcactcgataccaggagaccttcaacgtcatcgagaggtgccccaagcccgtgattgctgccgtccatgggggctgcattggcggaggtgtggaccttgtcaccgcctgtgacatccggtactgtgcccaggatgctttcttccaggtgaaggaggtggacgtgggtttggctgcccatgtaggaacactgcagcgcctg

SEQ ID NO: 198 - protein, 168 aa, Homo sapiens
FVAHSLSSAAARSRLCPKEETVTDLETAVLYPSHSSFTMPGSLPLNAEACWPKDVGIVALEIYFPSQYVDQAELEKYDGVDAGKYTIGLGQAKMGFCTDREDINSLCMTVVQNLMERNNLSYDCIGRLEVGTETIIDKSKSVKTNLMQLFEESGNTDIEGIDTTNACY

SEQ ID NO: 199 - protein, 168 aa, Homo sapiens
HRGGGEMAFSGSQAPYLSPAVPFSGTIQGGLQDGLQITVNGTVLSSSGTRFAVNFQTGFSGNDIAFHFNPRFEDGGYVVCNTRQNGSWGPEERKTHMPFQKGMPFDLCFLVQSSDFKVMVNGILFVQYFHRVPFHRVDTISVNGSVQLSYISFQPPGVWPANPAPITQ

SEQ ID NO: 200 - protein, 132 aa, Homo sapiens
GQEKSLAAEGRADTTTGSIAGAPEDERSQSTAPQAPECFDPAGPAGLVRPTSGLSQGPGKETLESALIALDSEKPKKLRFHPKQLYFSARQGELQKVLLMLVDGIDPNFKMEHQSKRSPLHAAAEAGHVDIC

SEQ ID NO: 201 - protein, 120 aa, Homo sapiens
MLVLVLGDLHIPHRCNSLPAKFKKLLVPGKIQHILCTGNLCTKESYDYLKTLAGDVHIVRGDFDENLNYPEQKVVTVGQFKIGLIHGHQVIPWGDMASLALLQRQFDVDILISGHTHKFE

SEQ ID NO: 202 - protein, 135 aa, Homo sapiens
RMCSLTFYSKSEMQIHSKSHTETKPHKCPHCSKTFANSSYLAQHIRIHSGAKPYSCNFCEKSFRQLSHLQQHTRIHTGDRPYKCAHPGCEKAFTQLSNLQSHRRQHNKDKPFKCHNCHRAYTDAASLEVHLSTHT

SEQ ID NO: 203 - protein, 135 aa, Homo sapiens
LLLARWHSAAFKVRAGARQELAMKSLKSRLRRQDVPGPASSGAAAASAHAADWNKYDDRLMKAAERGDVEKVTSILAKKGVNPGKLDVEGRSVFHVVTSKGNLECLNAILIHGVDITTSDTAGRNALHLAAKYGH

SEQ ID NO: 204 - protein, 167 aa, Homo sapiens
ALGEAPDHSYESLRVTSAQKHVLHVQLNRPNKRNAMNKVFWREMVECFNKISRDADCRAVVISGAGKMFTAGIDLMDMASDILQPKGDDVARISWYLRDIITRYQETFNVIERCPKPVIAAVHGGCIGGGVDLVTACDIRYCAQDAFFQVKEVDVGLAAHVGTLQRL

SEQ ID NO: 205 - DNA, 381 bp, Homo sapiens
aaatttgggatcatcgcctgttctgaaaactagatgcaccaaccgtatcattatttgtttgaggaaaaaaagaaatctgcattttaattcatgttggtcaaagtcgaattactatctatttatcttatatcgtagatctgataaccctatctaaaagaaagtcacacgctaaatgtattcttacatagtgcttgtatcgttgcatttgttttaatttgtggaaaagtattgtatctaacttgtattactttggtagtttcatctttatgtattattgatatttgtaattttctcaactataacaatgtagttacgctacaacttgcctaaaacattcaaacttgttttcttttttctgttgttttctttgttaattcattt

SEQ ID NO: 206 - DNA, 514 bp, Homo sapiens
aaaagtaaattgcataaaattacatccaatttctttctctaaaccaacatattcttcaccttcacaaagcaaacacatggtgcactgaaaccgaggtgttaccagctttacatactgttctgccatttgtggggggtgcaaccacaacataagtcagaaaaaaagctatccagcttttcgtggaatctggtgaagtttacacttagcgataagcctctaagcctgaacttagcagggctagcaaaactttatttatttcctaactcctattattttagaatggttttcaaaataatactgcaagttcctaattgaaatacaaaacagaacaaaaagctgtgagaaatctttttttttctttggctccttaaagacttggaataatttatattagtgttgcatacattttaccttctacattttgatgtacttgctcttgaaagcactagaacaaattaattgaaataaaacctctctgaaaccatttgaatctttgatcctaccatagagtttt

SEQ ID NO: 207 - DNA, 522 bp, Homo sapiens
  misc_feature 24: n = A,T,C or G
caagcttttggtgcatagcagccngcctggaagcattctgagtgctctgtctgccctggtgggtttcattatcctgtctgtcaaacaggccaccttaaatcctgcctcactgcagtgtgagttggacaaaaataatataccaacaagaagttatgtttcttacttttatcatgattcactttataccacggactgctatacagccaaagccagtctggctggaactctctctctgatgctgatttgcactctgctggaattctgcctagctgtgctcactgctgtgctgcggtggaaacaggcttactctgacttccctgggagtgtacttttcctgcctcacagttacattggtaattctggcatgtcctcaaaaatgactcatgactgtggatatgaagaactattgacttcttaagaaaaaagggagaaatattaatcagaaagttgattcttatgataatatggaaaagttaaccattatagaaaagcaaagcttgagtttcctaaatgtaagctttt

SEQ ID NO: 208 - DNA, 278 bp, Homo sapiens
aaaatgcactaccccttttttccaacacggagcttaaaacaaattaatgaaagagtggaaaattcaaaataagggcaagagataaggttttttttttttttcctttaagatagactcaggataggtagatagctttcactgatgtagatgtggaataaattattacttcaggaaaaaaattcccaaacatcttatgaaaaagtatacaactctacttcaaaatatgctatttactcactgccaaagacagttttatttgaaatcttgtttctgtattt

SEQ ID NO: 209 - DNA, 234 bp, Homo sapiens
  misc_feature 26: n = A,T,C or G
cctcccaaatttagcaggtgctgggnaggaccctagggagtggtttatgggggctagctggtgaaactgccctttcctttctgttctatgagtgtgatggtgtttgagaaaatgtggggctatggttcaggcgcacttcacatgtgcaaagatggagaaagcactcacctacacgtttaggctcagaatgttgattgaaacattttgaatgatcaaaaataaaatgttattttt

SEQ ID NO: 210 - DNA, 186 bp, Homo sapiens
  misc_feature 25: n = A,T,C or G
aaaataactgatggcaaaataaaanatttacatcacatcatactgtgtaaacatgtaaggtctctgtacaaagaaatatacatgcaaaataatgtaaaaatttaactgaaataataaaagaaacaatacacaaataaaaattatgaggttacgaatacacatccagtttcgaatccaatttctttt

SEQ ID NO: 211 - DNA, 403 bp, Homo sapiens
aaaaattggtaaaatatttaagtacaaaataagtagcttccagcgaggtttttataccatagtaagagcacacaatagatattactagcacacatgggttatctgggagcgctatagctacaataaacctaattatggaacagaaatttgcattctgtttccagtgctactacactcctactttctcaaaagtctgctctattaatatcagctcagtgcagtttactatgaatagtttatgtctgtgatgcaaagcattaattgttctctttttacaaacatacatttttttcataaggaagactgggggaaaacccagaaacatacagagaaaaggaaagcatcatcaaatatatgttaaaaattaagatgatgtttactactagtcatcctacaacaattt

SEQ ID NO: 212 - DNA, 345 bp, Homo sapiens
cctctttatgagttcattactgctgttcagtctcggcacacagacacccctgtgcaccggggtgtactttctactctgatcgctgggcctgtggttgagataagtcaccagctacggaaggtttctgacgtagaagagcttacccctccagagcatctttctgatcttccaccattttcaaggtgtttaataggaataataataaagtcttcgaatgtggtcaggtcatttttggatgaattaaaggcatgtgtggcttctaatgatattgaaggcattgtgtgcctcacggctgctgtgcatattatcctggttattaatgcaggtaaacataaaagctcaaaa

SEQ ID NO: 213 - DNA, 318 bp, Homo sapiens
aaaatgttttattattttgaaaataatgttgtaattcatgccagggactgacaaaagacttgagacaggatggttattcttgtcagctaaggtcacattgtgcctttttgaccttttcttcctggactattgaaatcaagcttattggattaagtgatatttctatagcgattgaaagggcaatagttaaagtaatgagcatgatgagagtttctgttaatcatgtattaaaactgatttttagctttacaaatatgtcagtttgcagttatgcagaatccaaagtaaatgtcctgctagctagttaaggattgtttt

SEQ ID NO: 214 - DNA, 462 bp, Homo sapiens
aaacacatctggttctggcagcaagttatattatgcatttagagcaataggtgccctgaaagttattgttgctttttttgttttttttttcagtttgtgcgtgtcacttgaatcagaaaccaaacacatgtaaaaaaatatcatcctcaatgccccccattaactctctctccagaaggtgacaatgttagtgaactcaagactctcactgatgatggtattttacaatgaaaacacaaggaaaccctttgaggtccaattttcacatcatattctccaaatagtaaaatagcagctctacatgttgatgaaaagaaatttcaatttcttcctatttgtttttactcatatcaacattaatatgtatctggatttattaatttccaaaaagaaaattttagttaccaaatatttcagaaatttaataaagcattatatatatgtaattagcacttatctacc

SEQ ID NO: 215 - DNA, 280 bp, Homo sapiens
aaacttttctgaaacgattagctgtagccaaattatgtggttacgttttgctacattagaatttgaaaatgcaatatgtgtggtaaatctactgtttgaaatttataatggtctctgatatgattcgaattttggtaacttttgaaagttattttccccctttagtcatggatttctatttgttttttaatgttaatttttctagaaagcatctgaattgactaggcttttcctatataaaaaactcaaaacttgttaactctgtactttaataaaattt

SEQ ID NO: 216 - DNA, 210 bp, Homo sapiens
aaaatctctggcttcaaagtttcttggggaaaggtcggtttacctcacattttttgtttccattagtaatattctaggtacctcacaaaatgtattatggtgccatggctgttagtttttagtgagtgctgtaggattaattcgaaaataggcagaattccattcctcccaaggtggcaaaaattagctatactgatgtaattgtcattt

SEQ ID NO: 217 - DNA, 398 bp, Homo sapiens
ctggagctgctagaacttgagatgagggcaagagcgattaaagccctaatgaaagctggtgatataaaaaagccagcctaggtatttaacttgattttgaattttaggtatgtttgaacaaagccacatcatttaattttgtatctaaaatttatttggggtcttatatgttatttctcatgtaacccttattaggactcattttagccctaaattacctgtggctgtttctttttatttttttgactacttttatattataaatgtgtgttactgtcttatgaattcatggcaatatagttggatagcctggatactttgttagatgagtatttagctgtgtctgcaaatcttaaaagccattagcaaagagtcgtggtatttttttctttattttt

SEQ ID NO: 218 - DNA, 487 bp, Homo sapiens
ctgccgccggtcaggctggttaaagatcaggtcccccaggaccttgcgatttatgtcgccattctccagcaagacctcagtgccgaagacctctacgatgcgccggtgggcagggtatcctggctgcacgacgtgccgggccatcacgtccacgtcaatcaccgcacagcccagtttcagtgtttttacacattatattgttataatctcacaataactataaattaggtagaacaggaaatgaggtttggagaagatacttgacttatccgaccatctgtacttgtcccatagtaaggagcctcaagcagagacaaaggaggaagttgcctatgttgtatggtttacaggccataaatgaatgtcatctttttcctcccctggggaaaaatgtctcaaaaatcccaccataggacatgacatctccagaacctctattacaaaatacacatttcctgtagaggggtaacaaatttgggttaacctg

SEQ ID NO: 219 - DNA, 390 bp, Homo sapiens
aaaaaatacaccacacgatacaactcaatacaggagtatttcttctcaaattcttctagcaccatcaacattcttcaagtatctgaaatactattaattagcacctttgtattatgaacaaaacaaaacaaggacctcagttcatctctgtctaggtcagcacctaacaatgtggatcacactcatgggaaagtgttttgaggtagtttaaacctttggaagtttgggttttaaacttccctctgtggaagatattcaaaagccacaagtggtgcaaatgtttatggtttttatttttcaatttttattttggttttcttacaaaggttgacattttccataacaggtgtaagagtgttgaaaaaaaagttcaaatttttgggggagcgg

SEQ ID NO: 220 - DNA, 341 bp, Homo sapiens
  misc_feature 86, 87, 88, 188, 189, 190: n = A,T,C or G
aaaacaggcaaagttttacagagaggatacatttaataaaactgcgaggacatcaaagtggtaaatactgtgaaataccttttctnnncaaaaggcaaatattgaagttgtttatcaacttcgctagaaaaaaaaaaacacttggcatacaaaatatttaagtgaaggagaagtctaacgctgaactnnnaatgaagggaaattgtttatgtgttatgaacatccaagtctttcttcttttttaagttgtcaaagaagcttccacaaaattagaaaggacaacagttctgagctgtaatttcgccttaaactctggacactctatatgtagtgcattttta

SEQ ID NO: 221 - DNA, 234 bp, Homo sapiens
ccagggggaattgagggaggctctaagctaggggcactgcatggtgggacaggatggccccttgaggactgaaccctggggagaagacaaacagtaataataaaaacaaataacaagtactttaagaatggattgtatgacctatagtgacagatgacatcactaatactgaaagcttcttatattaataattttggcaaaatgtcattttgtaatatagtatatgctttccag

SEQ ID NO: 222 - DNA, 186 bp, Homo sapiens
aaattttcattgagttgtccatctccagcatatagggcttcaggagcagagcagaccttgtttttagtggttccatgggataaaatgggattggaggagctagaagaattcagggtctggtccaatctgccagtcttcctgaaatatcgaaaatacaccagggctgctatatcagagccaccctgg

SEQ ID NO: 223 - DNA, 486 bp, Homo sapiens
ccataagcagataagtagcagttcaactggatgtctctcttctccaaatgctacagtacaaagccctaagcatgagtggaaaatcgttgcttcagaaaagacttcaaataacacttacttgtgcctggctgtgctggatggtatattctgtgtcatttttcttcatgggagaaacagcccacagagctcaccaacaagtactccaaaactaagtaagagtttaagctttgagatgcaacaagatgagctaatcgaaaagcccatgtctcctatgcagtacgcacgatctggtctgggaacagcagagatgaatggcaaactcatagctgcaggtggctataacagagaggaatgtcttcgaacagtcgaatgctataatccacatacagatcactggtcctttcttgctcccatgagaacaccaagagcccgatttcaaatggctgtactcatgggccagctctatgtggtaggtggatcaaatgg

SEQ ID NO: 224 - DNA, 322 bp, Homo sapiens
aaatgttcactatgtcatttagtgtccaactttacggataggttgactatctaaataggcatttttagtcattaaaaaaaaatctagtcaccaggaggatccctataactcaaaataacttgtttgtaaaagaaaatttgtttacttacccattagtaagttcctgcatattcattataagatggcaaatcaaacttttctaggatgaagacagcttatttttaagttgtatagtcttagttggtttagggtctcaattttaattaataaaatacttggtttttatttgcttgtccttttgaattcctgttttaataatttt

SEQ ID NO: 225 - DNA, 489 bp, Homo sapiens
aaatgtaggaataaaatggctggcatctaagcactttagtaaaagaggtttttacaaataactaaggattgtagagcttccttctctttttttttctttttctttcttttgttttacatgaactcaacttattcctaacatttgtctacctcaaagaaatttcaagattatttagataacatggatatgtgccaaatcctttgagctgttaagatgataatttcctgctttcctcctacatcttctcctcccactccctcctttggtgtgaatattggcttcccaattaagaccttttttttttttttccagtttgttttagcttattataggttttggaggaactttgccattttgtaatctttcaaatcattcttcacccttcctcacatcagcttcctgcttttcccagtgttttactgtaaattgtgtagcatatgacaaatcttgagctgactttcctcttcactgatgtcatcttgagctctt

SEQ ID NO: 226 - DNA, 398 bp, Homo sapiens
caagggcccaccgcagagcacacctatgctatggggagccctgctggcagccccgagagccatgccatggcctgcaggagccaggctcctgtgtggatgaagtccctcttcctctgtgccttgatcccttgggggtgcctttggtcatctcttctgtcctttcctgtctctgaaatagtcatcactccccttgactctctctgttcacgtcttctcagtctgcagagttaacttctgtaaggagtttaatctggggttccaagaaaacaagttccttgttaacatagcactgactttgcaacaatagaaaactaacaaatgagcaacaatataaagagtagaggtagttctcattgggtgtaacttcaacccattctgcttgtggttagaatttataa

SEQ ID NO: 227 - DNA, 535 bp, Homo sapiens
ctgctgcatagaaaatatgctaacatacaacagtcaagtttaagcctgtgcatagagaagataaagcacttatggtaactgcaaatggtaacgagtccttaaggtttgtacaacctagtatgggtccataaggaaaaactgtagtagaaatggttaggacaaacaataaagtagaaacaggggggaaacttgagaagagaagaaagaagcaagaaaaaaagactttcaattgtataaaattcacaaaccagtaaagtataaagacaccatggagaaatggttaactctgccccaaacacccaacagcaaacaaaaccagaatgaataagcctttggcagacaattttagaaatttgaatgttacatttctcaataattcacaaacaatatattatatggtatatttatattaaatattgggaaaccaatgttgtaaatttgatgcttataatgctttagccaatgagagcacaatgatatcaatcaagctaaatgaatgctggtgttatcacaacagtgctcatttatgaaacaa

SEQ ID NO: 228 - DNA, 301 bp, Homo sapiens
aaacaataaacaccatcaaccttattgactttattgtcccttaaattatattgactgttgtgattccatcaagtttgtacactcttttctctccctgttttgcagcaacaaattgcgaagtgcttttgtttgtttgttttcgtttggttaaagcttattgccatgctggtgcggctatggagactgtctggaaggcttggaatggtttattgcttatggtaaaatttgcctgatttcttacaggcagcgtttggaaaccttttattatatagttgtttacatacttataagtctatcattt

SEQ ID NO: 229 - DNA, 420 bp, Homo sapiens
aaagttgctttgctggaagtttttataaggaatctcagattaaacctttagaagtttaattgacactaggaagccaaaccaaggctgacttcagactttgtttgtagtacctgtgggtttattacctatgggtttatatcctcaaatacgacattctagtcaaagtcttggtaatataaccaatgttttcaaatgtattctgtcatacaaagagcagatttttattgaacttgtgcaataactatattaccatacaatataaatattcatgaatagtttcccaagtctggagcgaccacatagggagaaaatgcaaatgtctcaatttttgttcacaaaagtatattttatcaaattgctgtaagctgtggatagcttaaaagaaaaaaagtttcctgaaatctgggaaacaagacattt

SEQ ID NO: 230 - DNA, 419 bp, Homo sapiens
gtgaagtcctaaagcttgcattccaccagcttctacaatagccggcttattactagagcagacagatagcaccttcagcactctgcttgtggtccacagtagtttttcgtaagtataggtcctcattatatttactaaagcttggggtccaccactagccagtatgatgagcttgctttcttggttgccataagctaaaatttgaaggcagtctgtcgtaatagccaagaatttaacatttgttttgttgagcaaggcaaccattttctgcagcccaccagctaaacgcactgccattttagctccttcttgatgtaataaaaggttgtggagagttgtaatggcataaaacaacacagaatccactggtgaaccaagcattttcaccagggcaggaatgcctccagacttaaagatgg

SEQ ID NO: 231 - DNA, 389 bp, Homo sapiens
ttgttcagagccctggtggatcttgcaatccagtgccctacaaaggctagaacactacaggggatgaattcttcaaataggagccgatggatctgtggtcctttgggactcatcaaagccttggtttagcattttgtcagttttatcttcagaaattctctgcgattaagaagataatttattaaaggtggtccttcctacctctgtggtgtgtgtcgcgcacacagcttagaagtgctataaaaaaggaaagagctccaaattgaatcacctttataatttacccatttctatacaacaggcagtggaagcagtttcagagaactttttgcatgcttatggttgatcagttaaaaaagaatgttacagtaacaaataaagtgcagttt

SEQ ID NO: 232 - DNA, 397 bp, Homo sapiens
ccaggataatatacacaggtttgcagctaaaactgtgcacagtgggtcattgatgctagtcacagtggaactgaaggaaggctctacagcccagcttatcataaacactgagaaaactgtgattggctctgttctgctgcgggaactgaagcctgtcctgtctcaggggtaacctgcttacatctggactttagaatctggcacacaacaaaagtgcctggcatccactactgctgcctttcatttataataatagcccttccatctggcagtgggggaagaatacactcttgacattcttgtctcctgctttagaatgctagtgtgtatctatcatgtatgcaatactttccccctttttgctttgctaaccaaagagcatatattttactgtcag

SEQ ID NO: 233 - DNA, 508 bp, Homo sapiens
cgaggagtcgcttaagtgcgaggacctcaaagtgggacaatatatttgtaaagatccaaaaataaatgacgctacgcaagaaccagttaactgtacaaactacacagctcatgtttcctgttttccagcacccaacataacttgtaaggattccagtggcaatgaaacacattttactgggaacgaagttggttttttcaagcccatatcttgccgaaatgtaaatggctattcctacaaagtggcagtcgcattgtctctttttcttggatggttgggagcagatcgattttaccttggataccctgctttgggtttgttaaagttttgcactgtagggttttgtggaattgggagcctaattgatttcattcttatttcaatgcagattgttggaccttcagatggaagtagttacattatagattactatggaaccagacttacaagactgagtattactaatgaaacatttagaaaaacgcaattatatccataaatatttttt

SEQ ID NO: 234 - DNA, 358 bp, Homo sapiens
aaatgttggtattcaaaaccaaagatataaccgaaaggaaaaacagatgagacataaaatgatttgcaagatgggaaatatagtagtttatgaatgtaaattaaattccagttataatagtggctacacactctcactacacacacagaccccacagtcctatatgccacaaacacatttccataacttgaaaatgagtattttgcatatctcagttcaggatatgttttttacaagttaatcctaaagtcataaagcaagaagctattcatagtacaagattttatttgctaagctttacaaattaaactctaaaaaattattacaatgatactgaaagatattttattggcctttt

SEQ ID NO: 235 - DNA, 482 bp, Homo sapiens
gaagaaagttagatttacgccgatgaatatgatagtgaaatggattttggcgtaggtttggtctagggtgtagcctgagaataggggaaatcagtgaatgaagcctcctatgatggcaaatacagctcctattgataggacatagtggaagtgagctacaacgtagtacgtgtcgtgtagtacgatgtctagtgatgagtttgctaatacaatgccagtcaggccacctacggtgaaaagaaagatgaatcctagggctcagagcactgcagcagatcatttcatattgcttccgtggagtgtggcgagtcagctaaatactttgacgccggtggggatagcgatgattatggtagcggaggtgaaatatgctcgtgtgtctacgtctattcctactgtaaatatatggtgtgctcacacgataaaccctaggaagccaattgatatcatagctcagaccatacctatgtatccaaatggtt

SEQ ID NO: 236 - DNA, 149 bp, Homo sapiens
cctcttcattgttcacatgtcacaggaggaggctctgagcaaaggccactggcaagttagggcaacaccaagaaggctctgcggagagactccctgtgggttggggcctggcaggaacggtgcctgtggactgtttatggtctgtccag

SEQ ID NO: 237 - DNA, 391 bp, Homo sapiens
gaagctaaatccaaagaaatatgaaggtggccgtgaattaagtgattttattagctatctacaaagagaagctacaaacccccctgtaattcaagaagaaaaacccaagaagaagaagaaggcacaggaggatctctaaagcagtagccaaacaccactttgtaaaaggactcttccatcagagatgggaaaaccattggggaggactaggacccatatgggaattattacctctcagggccgagaggacagaatggatataatctgaatcctgttaaattttctctaaactgtttcttagctgcactgtttatggaaataccaggaccagtttatgtttgtggttttgggaaaaattatttgtgttgggggaaatgttgtgggggtgggg

SEQ ID NO: 238 - DNA, 374 bp, Homo sapiens
aaaaaacaaaacaatgtaagtaaaggatatttctgaatcttaaaattcatcccatgtgtgatcataaactcataaaaataattttaagatgccggaaaaggatactttgattaaataaaaacactcatggatatgtaaaaactgtcaagattaaaatttaatagtttcatttatttgttattttatttgtaagaaatagtgatgaacaaagatcctttttcatactgatacctggttgtatattatttgatgcaacagttttctgaaatgatatttcaaattgcatcaagaaattaaaatcatctatctgagtagtcaaaatacaagtaaaggagagcaaataaacaacatttggaaaaaaaaaaaaaaaaaaa

SEQ ID NO: 239 - DNA, 200 bp, Homo sapiens
aaagatgtctttgaccgcatatgtactggaaatttcaaacgtggatcttcccaggttgtagtctttgtgttatgatcaatgaagaagggccggccgtttggcgctatcctcatttcccagccgggtggcaagaagctctgtgtgactttgtgttgtggtttgggggagttgtaaggtgatggctgtggggactgtgggtt

SEQ ID NO: 240 - DNA, 314 bp, Homo sapiens
  misc_feature 67, 71, 76, 99, 224: n = A,T,C or G
ctggtaaactgtccaaaacaaggttccaaataacacctcttactgatttaccctacccatacatatnccanatagnttttgatcaaaaacatgaaatanatccacctgcttattttaagcatattaaaaaggaaactaattggaccattttctatttgtctattttatacaaaaaggctacacaattgatacactctattcagataacaatcaattagagtgantatgaattactggcgacaccatcactcaattcttaaaaattagaaattgctgtagcagtattcactataacttaacactaccgagagact

SEQ ID NO: 241 - DNA, 375 bp, Homo sapiens
  misc_feature 302, 316, 328, 329, 333, 340, 343, 354, 355, 362: n = A,T,C or G
ccaagtccttggagttataggatattcattacttcctctcattgtaatagcccctgtacttttggtggttggatcatttgaagtggtgtctacacttataaaactgtttggtgtgttttgggctgcctacagtgctgcttcattgttagtgggtgaagaattcaagaccaaaaagcctcttctgatttatccaatctttttattatacatttatcttttgtcgttatatactggtgtgtgatccaagttatacatgaatagaaaaagatggtgttaaatttgtgtgtaggctgggaattctngctaaaggaatggnaaaaaacctgtnnttgnaaaattnacntgtcccaaagnnaaggaanctaaacgcttttt

SEQ ID NO: 242 - DNA, 387 bp, Homo sapiens
aaaggcattctctgatttacatgagaattgagaaactgagatgtatgatttgtctgttagtcaatttcacaccctttcattctcataagccccaaattttgctcagttaaggagcttgctttaggcccacctatgtaagtctgttatactagctaatgtgcccatttgaatagttcaagggtcagctaatgctctgagcttcatggctccagtataaagaacaaatttaacaaaattaagctgttactgtagccgagttacccttctgctccacacatatgtagtgggatcttgcaggatttccatagtgccaattatcaaaggccttgactacttagcattgctgtattacagatgtgcaaactgaggcactgaaaagtcaaattt

SEQ ID NO: 243 - DNA, 536 bp, Homo sapiens
  misc_feature 30, 344, 510: n = A,T,C or G
aaaccaaaaggacgaagaaaaaacactttnaaaaaaaaaaaaaaaaaagaaaaaccaaaccatattttgccacatgtgagagtacggtcaagcagtatttacaaaaaggttaacggaacaacactctgacacatgctctgagaatactgggactgctgtttcaaaaaaaaaggttcaaacttattgtcacagcatcatcacaaaatagaggatcaccattggtttgcttggcttttctttttttttttcccccaagtgaggacctaactccaaataatacaatagaatatgcaaattatcttcacatcaagagtaccccaagaaaaacgaaatccatggcacanacactgtacaagggtgcagggcagggctctgaggggcccaaaccccattttgccaactcgattttctagcattgaagggagcaaggggtcaggcatatgatggagatgatactgaaatgatttatccaaaatccatgcaaatcaagttctttggatagaggtgaanaacttggacatggctgtttcaggcag

SEQ ID NO: 244 - DNA, 397 bp, Homo sapiens; identical to SEQ ID NO: 232

SEQ ID NO: 245 - DNA, 508 bp, Homo sapiens; identical to SEQ ID NO: 233

SEQ ID NO: 246 - DNA, 358 bp, Homo sapiens; identical to SEQ ID NO: 234

SEQ ID NO: 247 - DNA, 673 bp, Homo sapiens
  misc_feature 605, 618, 635, 644, 651, 660, 668: n = A,T,C or G
gaagaaagttagatttacgccgatgaatatgatagtgaaatggattttggcgtaggtttggtctagggtgtagcctgagaataggggaaatcagtgaatgaagcctcctatgatggcaaatacagctcctattgataggacatagtggaagtgagctacaacgtagtacgtgtcgtgtagtacgatgtctagtgatgagtttgctaatacaatgccagtcaggccacctacggtgaaaagaaagatgaatcctagggctcagagcactgcagcagatcatttcatattgcttccgtggagtgtggcgagtcagctaaatactttgacgccggtggggatagcgatgattatggtagcggaggtgaaatatgctcgtgtgtctacgtctattcctactgtaaatatatggtgtgctcacacgataaaccctaggaagccaattgatatcatagctcagaccatacctatgtatccaaatggttctttttttccggagtagtaagttacaatatgggagattattccgaagcctggtaggataagaatataaacttcagggtgaccgaaaaatcagaataggtgttggtatagaatggggtctcctnctccgcggggtcnaagaaggtggtgttgangttgccggnctgttantagtatagngatgccancagct

SEQ ID NO: 248 - DNA, 149 bp, Homo sapiens; identical to SEQ ID NO: 236

SEQ ID NO: 249 - DNA, 458 bp, Homo sapiens
  misc_feature 450: n = A,T,C or G
gaagctaaatccaaagaaatatgaaggtggccgtgaattaagtgattttattagctatctacaaagagaagctacaaacccccctgtaattcaagaagaaaaacccaagaagaagaagaaggcacaggaggatctctaaagcagtagccaaacaccactttgtaaaaggactcttccatcagagatgggaaaaccattggggaggactaggacccatatgggaattattacctctcagggccgagaggacagaatggatataatctgaatcctgttaaattttctctaaactgtttcttagctgcactgtttatggaaataccaggaccagtttatgtttgtggttttgggaaaaattatttgtgttgggggaaatgttgtgggggtggggttgagttgggggtattttctaattttttttgtacatttggaacagtgacaataaatganaccccttt

SEQ ID NO: 250 - DNA, 374 bp, Homo sapiens; identical to SEQ ID NO: 238

SEQ ID NO: 251 - DNA, 356 bp, Homo sapiens
aaagatcttctctaacaagctatgggaatttggcttcatactctttctttgcaacagcagtgttctgggtgataattttgaattgatacctgttcctttttctgggttttgttggctttttgaaaaattgtctttccttatcattggtgggaggcttggtagcaaagtaacattttttggaaaagaggacagaaaaattgaactacagcttgagaacgtattctttttttcctactttgttattgcaaattgaggaatcacttttaactgttttaggtgtgtgtgtccagagtgagcaaggattatgtttttggattgtcaaagaggatgcttagtcttaaaataaaaataaattt

SEQ ID NO: 252 - DNA, 484 bp, Homo sapiens
ctggtaaactgtccaaaacaaggttccaaataacacctcttactgatttaccctacccatacatatcccaaatagtttttgatcaaaaacatgaaatagatccacctgcttattttaagcatattaaaaaggaaactaattggaccattttctatttgtctattttatacaaaaaggctacacaattgttacactttattcagattacaattaattagagtgattatgaattagtgttctacaccattactcaattcttaaaaattagaaattgctgtagcagtattcactataacttaacactacgagagacttaaaaaacagttactgcaaaaaaaaaaaagagctacttcaaagcaagcaaagtcagtaccattacagatattcttaaaaaaaaaaaaaaatttaacaagcaaggctagggtttgataaattccatcttgtgatccattcttgtgcattcttcacttcttgagtcactccc

SEQ ID NO: 253 - DNA, 379 bp, Homo sapiens
aaaaagcgcttagacttccctttccatctggaacatgtaaaattttgcagcaacaggttttctccaattccttcagcaagaattcccagcctacacacaaatttaacaccatctttttctattcatgtataacttggatcacacaccagtatataacgacaaaagataaatgtataataaaaagattggataaatcagaagaggctttttggtcttgaattcttcacccactaacaatgaagcagcactgtaggcagcccaaaacacaccaaacagttttataagtgtagacaccacttcaaatgatccaaccaccaaaagtacaggggctattacaatgagaggaagtaatgaatatcctataactccaaggacttgg

SEQ ID NO: 254 - DNA, 387 bp, Homo sapiens
  misc_feature 66: n = A,T,C or G
aaatttgacttttcagtgcctcagtttgcacatctgtaatacagcaatgctaagtagtcaaggccnttgataattggcactatggaaatcctgcaagatcccactacatatgtgtggagcagaagggtaactcggctacagtaacagcttaattttgttaaatttgttctttatactggagccatgaagctcagagcattagctgacccttgaactattcaaatgggcacattagctagtataacagacttacataggtgggcctaaagcaagctccttaactgagcaaaatttggggcttatgagaatgaaagggtgtgaaattgactaacagacaaatcatacatctcagtttctcaattctcatgtaaatcagagaatgccttt

SEQ ID NO: 255 - DNA, 225 bp, Homo sapiens
  misc_feature 30: n = A,T,C or G
aaatgtcttgtttcccagatttcaggaaantttttttcttttaagctatccacagcttacagcacctttgataaaatatacttttgtgaacaaaaattgagacatttacattttctccctatgtggtcgctccagacttgggaaactattcatgaatatttatattgtatggtaatatagttattgcacaagttcaataaaaatctgctctttgtatgacagaat

SEQ ID NO: 256 - DNA, 544 bp, Homo sapiens
  misc_feature 31, 445, 518: n = A,T,C or G
ccttgcttaaagcccagaagtggtttaggcntttggaaaatctggttcacatcataaagaacttgatttgaaatgttttctatagaaacaagtgctaagtgtaccgtattatacttgatgttggtcatttctcagtcctatttctcagttctattattttagaacctagtcagttctttaagattataactggtcctacattaaaataatgcttctcgatgtcagattttacctgtttgctgctgagaacatctctgcctaatttaccaaagccagaccttcagttcaacatgcttccttagcttttcatagttgtctgacatttccatgaaaacaaaggaaccaactttgttttaaccaaactttgtttggttacagttttcaggggagcgtttcttccatgacacacagcaacatcccaaagaaataaacaagtgtgacaaanaaaaaaacaaacctaaatgctactgttccaaagagcaacttgatggttttttttaatactgagtgcaaaaggncacccaaattcctatgatgaaatttt

SEQ ID NO: 257 - DNA, 420 bp, Homo sapiens
aaatgtcttgtttcccagatttcaggaaactttttttcttttaagctatccacagcttacagcaatttgataaaatatacttttgtgaacaaaaattgagacatttacattttctccctatgtggtcgctccagacttgggaaactattcatgaatatttatattgtatggtaatatagttattgcacaagttcaataaaaatctgctctttgtatgacagaatacatttgaaaacattggttatattaccaagactttgactagaatgtcgtatttgaggatataaacccataggtaataaacccacaggtactacaaacaaagtctgaagtcagccttggtttggcttcctagtgtcaattaaacttctaaaagtttaatctgagattccttataaaaacttccagcaaagcaacttt

SEQ ID NO: 258 - DNA, 736 bp, Homo sapiens
aaacaaaatgctaaacctaaaaacattgttctgtcagttcccaaattaaatctacttagaacaaaaacaaaaatttatagctcggtcacatactacttaaataatattgttcaggcatctctaaaatcctccatgttttcaagtatggaaatagaactcaaatattccacaatacagtactaaacagatggagtatttaggaaagactttgttgtcatatggcacaatattaatattttgttgcttcaatacgttttgaaataaatatcagatttttgtttttttttcctaaaagaccaaaattataatctacattaagataattctgactgtggttaagacttaagagtgtaaaatacaacatcaatattttatcacaaaagtaaagctggtaacaaattataaaaggagccagtactctactgagacaggctcggagattaaagctcatcatgatagaaatagtcatcatggagctgtctgccataatctgtggcttcactggtgagaaacaagtccgggttttccagaatctcttcttcagagagctttttgtcaccattcaaatccatttcatcaattagatgaagcgcctcctcttgtgcaatgccctgattattaggtctacccaaggtaacagctcttggggatcaagcctgccatcgttatctttgtcataatcattcaccgaatctgtctttctcacaagtatcccattctggatcttcatttgcag

SEQ ID NO: 259 - DNA, 437 bp, Homo sapiens
  misc_feature 32: n = A,T,C or G
aaaaccatactgaaatcatttaccaaataacnaagatcttaatctaaaagatagtgaatacatcatcatcatgaaatctggttttatgtgctctatgaagtacttggagaattgcttttttatttttcttttgctttattaggtcacacaaaacagaatgaattagcagaaaaatgtatgttataaaacagcatttactacttcaatttaattttttttactaacaattgtggacctttttgatgacacttatgtatgtttttaataaattatgtacttattagtacttaatgagcccttcctgcctcaatataaaattactaaacttggagaattacagattttattgtaggccctgatgttagtcactttggagaagctaaaaatttggaaatgatgtaattcccactgtaatagcatagggattttggaagcag

SEQ ID NO: 260 - DNA, 592 bp, Homo sapiens
ttttttttttgaaaaatataaaattttaataaaggctacatctcttaattacaataattattgtaccaagtaattttccttaaatgaactctttataatgcataatttacagtataagtagaacaaaatgtcatgacaaaagtcattgagtacaagacttgtaataaaaaggcataaaatatatttatacataaacccctttcaaaaaacaagggaaagcttgagccctcaatatagggcgacacacggagcgggtgaccgtgcaggtacaggtactgtactgatttaaagtcaagcactagagatagtggattaatactcttttgccgtacactatatacagatgtatagtacaagtaacaatggcaaacagaatgtacagattaacttaacacaaaaacccgaacatcaaaatgaaggtgtgtggaggaaaggtgctgctgggtctccctacaactgttcatttctttgtggggcagggggtagttcctgaatggctgtggtccaatgactaatgtaaaacaaaaacagaaacaaaaaaaacaaggaactgtcatttccacgaaagcacagcggcagtgattctagcagg

SEQ ID NO: 261 - DNA, 450 bp, Homo sapiens
gtggcagggcccagccccgaaccagacaagggacccctcaaggagcttcattctagcatgagaaaattgagaagtaaaccagaaagttacagaatgtctgaaggggacagtgtgggagaatccgtccatgggaaaccttcggtggtgtacagatttttcacaagacttggacagatttatcagtcctggctagacaagtccacaccctacacggctgtgcgatgggtcgtgacactgggcctgagctttgtctacatgattcgagtttacctgctgcagggttggtacattgtgacctatgccttggggatctaccatctaaatcttttcatagcttttctttctcccaaagtggatccttccttaatggaagactcagatgacggtccttcgctacccaccaaacagaacgaggaattccgccccttcattcgaaggctcccagagttt

SEQ ID NO: 262 - DNA, 239 bp, Homo sapiens
  misc_feature 32: n = A,T,C or G
taactttgatgacaaaatctaaaattaaaganttagtcttaaaagcctatagtgacttgtttacttgcataaataatattttcacttagtacaggctattaatataagtaatgagaatttaagtattaactcaaaaaaagatagaggctccaaacttttctaagaaattaatgcattttcaaagtaataatataatcaatctgtaagtcaaaagtaatttcatattcattgccaaattt

SEQ ID NO: 263 - DNA, 376 bp, Homo sapiens
  misc_feature 27, 32, 65, 362: n = A,T,C or G
aaaaaaaaaaaaaaaaaattccttgtngtttnttagaggaaaaaaagaaaaaccccaacttttancactgatactacatattgctctgttaaagaattttctctgccaaaaaaaagaaaaaacaaaaaaacgcttaaagctggagtttgacattctgctttcagatgctgtctttttattagtgagtgatgatggtttgctaataatcaataggtaataattttttgtaatcccatcaagtggctccatatgtttctgctctctcgtgactgtgttaatgtttaactgttgtaccttaaagccgaaatcagtaactatgcatactgtaaccaaggtattgggcttacagagttgtttgttgnataaagaaaatttt

SEQ ID NO: 264 - DNA, 207 bp, Homo sapiens
aaattagcattccacaaatatacaggtaatttaataattattgtgcatgaatacatacacaatgcttatatatacaaattccagtttgttttcatgtgctggcaagggatttgtatacaatcataagctgtgttcatattggtcccattgaatattcacaatacaaaagcacaaaagaaccattgatttacaaaaggaaatctattt

SEQ ID NO: 265 - DNA, 388 bp, Homo sapiens
  misc_feature 1, 31, 65, 68: n = A,T,C or G
naactgcactttatttgttactgtaacattnttttttaactgatcaaccataagcatgcaaaagnccnctgaaactgcttccactgcctgttgtatagaaatgggtaaattataaaggtgattcaatttggagctccttccttttttatagcacttctaagctgtgtgcgcgacacacaccacagaggtaggaaggaccacctttaataaattatcttcttaatcgcagagaatttctgaagataaaactgacaaaatgctaaaccaaggctttgatgagtcccaaaggaccacagatccatcggctcctatttgaagaattcatcccctgtagtgttctagcctttgtagggcactggattacaagatccaccagggctctgaacaa

SEQ ID NO: 266 - DNA, 616 bp, Homo sapiens
  misc_feature 32: n = A,T,C or G
aaatacagagtcaaaagatgatttataaaatntaaaacattttctgcttggccgtatttgaagacaagctgaatacatatctatgttctgaataagtccactatggatatatataggaagagatatacatatatccatccacagatacacacacacatatatatttctgcatgtatatatacataattctttctatagttacaggaaatacttcttctataattctgattttgactcccatcctccaccatttactcatccactcattacctaaatcttggctttctttcctatattgtaaataatccatccaaacttctagccagtactgtcaggagggttcttgctcgagtgagctgttaatactattttccactgacaacttctgcacatcgaggacacagtgtatctgaagactccgctgtatacttccaacaacgggggcatttttctttcgtagtcggcatgacaattactttataggaagactcttcacgaatatcaccaccttctaagttgatgaggaatttccctttaagctcgattacatctgcagtcatctctcgtggttcctgaccagtaaagttgactcagaagccatcattaattcattcaa

SEQ ID NO: 267 - DNA, 341 bp, Homo sapiens
ccattatgtatgtattttcttgaaaaatacttatttcagctacttatttttaatagttacttattcttgttgtattgtcatttgagttttgtatatatttttgatattaaccccttgtcacatgtataatttgcaaatattttctccctttttttagttgtcacattctgttcattgtatcagattctgtgcagcagctttttaatttgaagtgatctgactgacttgttcttccttttgtgtcctgggatatttaggttaaatcaaaaaacttgctgcccagaccaatgttatggggctttcactctattttttggtagtagtagtttaagagttttagg

SEQ ID NO: 268 - DNA, 367 bp, Homo sapiens
  misc_feature 31, 66: n = A,T,C or G
ttgtagattggaatagcaaaagtgaatgctntgaccaaaatttttgccctcctaaataaagacgtntccttctagagagcaaatctatcataaaatgtcaaaactagaagagaataaaatgaaaggaaaaaacctagaaaaatatcctaaaatatcaaatgcagtcatttctaaatataagccataattatagctttacctattgttcttattgttcctatgctgcttctacaatgttacatcaactatacttagctttactctcccaaaatcttggtgatgaagccttctgagtgtgctttccaatgtgccagaaccagaagggcattccaaggcttccccacatttcctccatttacggagacag

SEQ ID NO: 269 - DNA, 270 bp, Homo sapiens
  misc_feature 29, 33, 62, 65, 68, 70, 264: n = A,T,C or G
caaatctctccctcactagacgtaagccntttnctcactctctcaatcttatgcatcatagnaangcngntgaggtggattaaaccaaacccagctacgcaaaatcttagcatactcctcaattacccacataggatgaataatagcagttctaccgtacaaccctaacataaccattcttaatttaactatttatattatcctaactactaccgcatccctactactcaacttaaactccagcaccacgaccctactactatntcgcac

SEQ ID NO: 270 - DNA, 368 bp, Homo sapiens
  misc_feature 32: n = A,T,C or G
ctgaatcatgaataacactatataatagagtntaaggaacacaagcattagatgtgatccttgccccatacccttagattatgtcagactaaagctgacaattctgccaggctctgaacccctagtgcccccaacccaaatcttggaagcaaagaatatgccctgtcatacaactttgtacaagttgtagtaaaacaaagcttaagttttctcatctttctacagcaaatggtcagttatttaataaacactaaaatgctcctaagaatccattttgagtttgtttaccaaacacattgtgcaagaactgactacacaaaaagttcctttgaaatttggtccacaaattcacttaaggttggaaattt

SEQ ID NO: 271 - DNA, 313 bp, Homo sapiens
  misc_feature 67, 68: n = A,T,C or G
aaatttatataaaactctgtacatgttcactttattattgcataaacagcataatcttcaagacaanngtttgcaaacacatgtccaattcaggaaaaaaaatttcacgtttctcgtctggcttttttcttcttttttatttgtttgggagattcccagctagtttcagacttggtctgtgaaggaggcacactattttgcttggtatttgacttggatttatctgtctcttgtagtattggcggcacttgggaagagctcttgtcagaatcactttttgataagattacagatggctcggtagaagtagcag

SEQ ID NO: 272 - DNA, 462 bp, Homo sapiens
  misc_feature 31: n = A,T,C or G
aaaaaacatttattttaataagactattgcnaacacattaaaaaaactaaatagtaatattacaaaatctatatacttgcacatttagtatttgtcaatgtgccagaggttttcttcatgaaatttgacttctttgaagtgaaggcttttttctatcatctcttatagctctgactgaataagtcttaatgctttcttcatgttttctatcaataggggtaaatcccgaggctcatatgtgtacaatctgttagagtatcttccagctatgtcagctctaactgttaaagaagggtctacaaacatgattctaggcacatattgcccatcaggtgataaattcttatcagtggtttcatgcataaggtttagcatgatgaacttattctgagccatttcttgtatttcttcattttgggcaaatactttctttagtgcttgagagtattgacaatcctccag

SEQ ID NO: 273 - DNA, 282 bp, Homo sapiens
  misc_feature 30, 66, 67: n = A,T,C or G
ctgatcaaagcatgggatattttaatagtnttatacataatatttttacatagaaaactttacatnncatttcatattatataattctgcttattctttcaaaaatttatacatccattgggcaaggaatggttttcattaaattaccaatattaaatgcacttaatcattgtgtataggttaaaccaaagtaactattaactaacttttaggcattttaaggaggtaaaacatacattttacacataagtatttgatgcaaatatgcagataaaatttttt

SEQ ID NO: 274 - DNA, 125 bp, Homo sapiens
  misc_feature 30, 33, 63, 68: n = A,T,C or G
cagccctagacctcaactacctaaccaacnttncttaaaataaaatccccactatgcacattnaatcnctccaacatactcggattctaccctagcatcacacaccgcacaatcccctatctagg

SEQ ID NO: 275 - DNA, 528 bp, Homo sapiens
  misc_feature 33, 68, 470: n = A,T,C or G
aaagctgtggaaaagctttattatagatttttntacagaattaaaaaagttcaaacaataataagccnggaaccacaaataattaaaaggaaacacagcaatcccataaacaagcattctggcatctgttagaaattttccctcaaattatgaaatgtagctctccatgctttccaatgattgttataatacccacaaatatctgtgatttcagtggaatactttaacaaaagttttctttttaaggcatgatcctgattcattttttcttcaatatctcagtcatttcaggaactaccttaaataaatctgcaactattccataatctgccacttggaaaattggagcttctgggtctttattaattgccacaattgtcttgctgtctttcatcccagctaaatgttggatggctccagatattccaacagcaatataaagttctggtgctactatttttcccgtctgnccaacttgcatgtcattgggaacaaagccagcatcaacagcagcacgggaagcaccaa

SEQ ID NO: 276 - DNA, 420 bp, Homo sapiens
  misc_feature 30: n = A,T,C or G
aaatgtcttgtttcccagatttcaggaaantttttttcttttaagctatccacagcttacagaaacctgataaaatatacttttgtgaacaaaaattgagacatttacattttctccctatgtggtcgctccagacttgggaaactattcatgaatatttatattgtatggtaatatagttattgcacaagttcaataaaaatctgctctttgtatgacagaatacatttgaaaacattggttatattaccaagactttgactagaatgtcgtatttgaggatataaacccataggtaataaacccacaggtactacaaacaaagtctgaagtcagccttggtttggcttcctagtgtcaattaaacttctaaaagtttaatctgagattccttataaaaacttccagcaaagcaacttt

SEQ ID NO: 277 - DNA, 668 bp, Homo sapiens
  misc_feature 31, 63, 566: n = A,T,C or G
ccagggtggctctgatatagcagccctggtntattttcgatatttcaggaagactggcagatngcaccagaccctgaattcttctagctcctccaatcccattttatcccatggaaccactaaaaacaaggtctgctctgctcctgaagccctatatgctggagatggacaactcaatgaaaatttaaagggaaaaccctcaggcctgaggtgtgtgccactcagagacttcacctaactagagacaggcaaactgcaaaccatggtgagaaattgacgacttcacactatggacagcttttcccaagatgtcaaaacaagactcctcatcatgataaggctcttacccccttttaatttgtccttgcttatgcctgcctctttcgcttggcaggatgatgctgtcattagtatttcacaagaagtagcttcagagggtaacttaacagagtatcagatctatcttgtcaatcccaacgttttacataaaataagagatcctttagtgcacccagtgactgacattagcagcatctttaacacagccgtgtgttcaaatgtacagnggtccttttcagagttggacttctagactcacctgttctcactccctgttttaattcaacccagccatgcaatgccaaataatagaaattgctccctaccag

SEQ ID NO: 278 - DNA, 202 bp, Homo sapiens
  misc_feature 30, 32, 63, 66: n = A,T,C or G
aaattggtatcgacggcaaccaggggaagntnctaaactcctaatctattctggatccaattngcnaagtggggtcccatcaaggttcagtggcagtggatctgggacagatttcactctcacgatcagcagtctgcaacccgaagattttgcaacttactactgtcaacagagttacatgtccccgtacacttttggaccc

SEQ ID NO: 279 - DNA, 694 bp, Homo sapiens
  misc_feature 63, 526, 577, 580, 586, 599, 608, 620, 624, 642, 643, 651,660, 668, 681, 687, 692, 693: n = A,T,C or G
ctgtacttggacaaaataagttaattctatttggttgtccattaaagttttatgtggctatgnacccactggagctaaaaattggcttttaactgtttccaaatcagaactagcagaggagagaagtaaataaagccaatggcactcccttcagaggctcaaaatggttagattttgatgcagatttaaccttagcgagtttcagtcagtccatttagatgatcctgtaggttcatacaaatacactgaaccgttggtttaacttctcttccttcctcaaagtttatgataaagagactcatccctgtattgggagtgactgacataagttcagatctgctcagagtggctggtaaggaacacttaaggtcagtcagaaaataatcaaacagacttctcatgtaagcaccgtgactcacaactaagacactggctgctaatcctggaataccgctgtctgaattaactttagagctgtgattttttcctaaaggaaatatctctgccaaagaagtttccagacagntgcttgggagatccttggggaaaactggtctttttgatccggttctttcangantaggtngacaaaagaaatncaaaaaagnctatcccacgcntttntcacctgggcccagcggnnctcctccnggggggggnaaacacangggactcttcccngggctngcttnng

SEQ ID NO: 280 - DNA, 441 bp, Homo sapiens
aaaaaacttccatgcaacttctggtttattgtttggcaactccacatgataaaaaaataaaaacagcccaaccgagtttcggaattaagtattcttctagtaagtgattcaaacttgtaatatttgccacaggactgacttatttatttactagctagaagctcttaagttcacttgtttatcagggcatatacagaagggtttgttaaaactcgatgttaactttacaactttctgacctggtgcatgaattctcaagtactgtatttcactgtgttggtgtgtctgatggaaatttcgaggtggtcccacaaaaatattttatgtagtgtgccttcaaagagaaccatttatttctcttcacttatcgtcccacaaagtcacatttggtggtggtcagccaagtcgcatctggtctagttttactcttgtcccaatttt

SEQ ID NO: 281 - DNA, 398 bp, Homo sapiens
aaatttgttaggtctgaagaatctaaaactgttaatttaacccttaacttgtgcctagaaactacagcacatataaaatatgtaaacaccagcctgttgctgtacttttctgcttattttacagcctcaaatatttctcattatcttgtcacttagttcttcatgtttctccttctgacttttaataatggtaataggaaaacaaaacccaaagcttttcagaacttcagtgtgaggtttcctattttgacaagttaacttgtaaatactcaggttttacgatgtataatttacctaatagaccaaactaactcatggagatattttgaactattatttaggtacaaactttataaagaatgttagtatgtcataaaatataacattacagcttattt

SEQ ID NO: 282 - DNA, 226 bp, Homo sapiens
  misc_feature 31, 65: n = A,T,C or G
aaaacaatattctctttttgaaaatagtatnaacaggccatgcatataatgtacagtgtattacnccaatatgtaaagattcttcaaggtaacaagggtttgggttttgaaataaacatctggatcttatagaccgttcatacaatggttttagcaagttcatagtaagacaaacaagtcctatctttttttttggctggggtgggggcgcccaggccgaggctgg

SEQ ID NO: 283 - DNA, 358 bp, Homo sapiens
aaacaaaaatactcaagatcatttatatttttttggagagaaaactgtcctaatttagaatttccctcaaatctgagggacttttaagaaatgctaacagatttttctggaggaaatttagacaaaacaatgtcatttagtagaatatttcagtatttaagtggaatttcagtatactgtactatcctttataagtcattaaaataatgtttcatcaaatggttaaatggaccactggtttcttagagaaatgtttttaggcttaattcattcaattgtcaagtacacttagtcttaatacactcaggtttgaacagattattctgaatattaaaatttaatccattcttaatatttt

SEQ ID NO: 284 - DNA, 288 bp, Homo sapiens
aaaacttttgttaagaaaaactgccagtttgtgcttttgaaatgtctgttttgacatcatagtctagtaaaattttgacagtgcatatgtactgttactaaaagctttatatgaaattattaatgtgaagtttttcatttataattcaaggaaggatttcctgaaaacatttcaagggatttatgtctacatatttgtgtgtgtgtgtgtgtatatatatgtaatatgcatacacagatgcatatgtgtatatataatgaaatttatgttgctggtattttgcatttt

SEQ ID NO: 285 - DNA, 629 bp, Homo sapiens
  misc_feature 31, 34, 35, 115, 435, 526, 585: n = A,T,C or G
cctaaaagcagccaccaattaacaaagcgtncannctcaacacccactacctaaaaaatcccaaacatataactgaactcctcacacccaattggaccaatctatcaccctatanaagaactaatgttagtataagtaacatgaaaacattctcctctgcataagcctgcgtcagattaaaacactgaactgacaattaacagcccaatatctacaatcaaccaacaagtcattattaccctcactgtcaacccaacacaggcatgctcataaggaaaggttaaaaaaagtaaaaggaactcggcaaatcttaccccgcctgtttaccaaaaacatcacctctagcatcaccagtattagaggcaccgcctgcccagtgacacatgtttaacggccgcggtaccctaaccgtgcaaaggtagcataatcacttgntccttaattagggacctgtatgaatggcttcacgagggttcagctgtctcttacttttaaccagtgaaattgacctgcccgtgaagaggcnggcatgacacagcaagacgagaagaccctatggagctttaatttattaatgcaaacagnacctaacaaaccccacaggtcctaaacttacccaaaccctggca

SEQ ID NO: 286 - DNA, 485 bp, Homo sapiens
aaatgtacttgctcagctcaactgcatttcagttgtattatagtccagttcttatcaacattaaaacctatagcaatcatttcaaatctattctgcaaattgtataagaataaagttagaattaacaattttattttgtacaacagtggaattttctgtcatggataatgtgcttgagtccctataatctatagacatgtgatagcaaaagaaacaaacaaaagccaggaaaacactcattttcgccttgaatatgtaaatgggattaattttgtcctgtgccttatgtggaaaggaacttctttggttttccttttttgttctggtggaagcatgtgcaggagacatatcatccaaacataaaccattaaaatgtttgtggtttgcttggctgtaattttcaaagtagttaattgaggacaaagggtaatgcagaagtgatagctttggtttgctgagtcttgttttaagtggccttgatattt

SEQ ID NO: 287 - DNA, 340 bp, Homo sapiens
cctggagtccaataaccaccccctcataccacaccctgtgcatacaccagccaagcctttcctggtctgggaagggaagagaaaaaagacgcaggccacctgggggttctgcagtctttggtcagtccagccttctatcttagctgcctttggcttccgcagtgtaaaccttgcctgcccggaggcaggaggcccagctggacctccgagggccatgagcaggcagcagccatcttggcctcaagcttgcctttcccttgagtccctctctcccctcggctctagccagaggtgtagcctgcagatctaggaagagaagagctggggaggaggatgaagg

SEQ ID NO: 288 - DNA, 290 bp, Homo sapiens
aaacagtctctcctcggtgttctccttgtcaaactgttcatcccagtttcctctgaaatagacagcattcaccagaaccagccttgtcaatggatccactgagcccggagagagcaactccgcaattttaccttctgtcttttcagctacccaggtgtttatgtgttttctggacttctctacggcgctgataaagtcaagctcctccatctctgcttggtagaatttttggcaggaatctctaaaagatgagaggaaatcacaagacttttccccaaagagcctgttgg

SEQ ID NO: 289 - DNA, 404 bp, Homo sapiens
ccacccacgcttaggttcccatcacactgatgactccgggtttggcgagcacaggagcgcaaaccttttcacattctttctgtgatccaaatttgttttcgtttccaccacaacctccataccagaatcttgcacagcttttggtgtttggatcatagtaccattttaatatgaaatccctgcaagttccttcgtctttcggcaacttgcatatatctgtttcagtgagagccaatggttctgtgctcaccattagattgatggttgaactagaagctgaccttgctggctgtggaggtgggggctgagatttctttgtactgaaacttccgtggtaggtggctctgacctgagacctcaggtagcagaccacagccacatggtatgtctgcccagcgagcagg

SEQ ID NO: 290 - DNA, 384 bp, Homo sapiens
  misc_feature 305: n = A,T,C or G
ccaggcgctccttgtcggcatcagggagggtggccttgaactgctcatgggctgtggtcagtccctggatctcctcaatggtgtgcacaatgaaggtgtcctgcaggtcctccatggccccctccatccagttgttgaagggtgcagcccgcttggcatactccaagtacagctggtcaatggtctccagcagtttctcggtccgctccagagcttcccttcgcttctgagttagggcccccagattgtcccactggtcacagatcttttggcaacgggcgttgacactgggtgagtcataatantccagctcattgagctcctgtgcgatggcggcaatctgctccacacggtcctggtgggcagccaggccactctcgaagg

SEQ ID NO: 291 - DNA, 278 bp, Homo sapiens
aaagtttatttttactatttctttatcactttattgtatcatcaccattggtttcataatgtaaatactatatgttgaacaaattaaatgtcaaaattttttattaccatagtccatgttaatagtggggctttcaggtgtttagagattttttttgttgttgttaacattcattgcaaaagtactagatggtgtataactctagagttgaattttaagggattccctaatatgtatactatctttttatctgaagtaataaataaacaatgatcttg

SEQ ID NO: 292 - DNA, 177 bp, Homo sapiens
ccttggcccggtcattcttgtccagtttgataggttcaggaaattcgttgtacagctccacctccgtttcctgcttaagtgcattccgtgcaatcgtctggaacgcctgctccacgttgatggcctccttggcactggtctcaaagtagggaatgttgtttttgctgtagcaccagg

SEQ ID NO: 293 - DNA, 403 bp, Homo sapiens
aaaaagaaggacttagggtgtcgttttcacatatgacaatgttgcatttatgatgcagtttcaagtaccaaaacgttgaattgatgatgcagttttcatatatcgagatgttcgctcgtgcagtactgttggttaaatgacaatttatgtggattttgcatgtaatacacagtgagacacagtaattttatctaaattacagtgcagtttagttaatctattaatactgactcagtgtctgcctttaaatataaatgatatgttgaaaacttaaggaagcaaatgctacatatatgcaatataaaatagtaatgtgatgctgatgctgttaaccaaagggcagaataaataagcaaaatgccaaaaggggtcttaattgaaatgaaaatttaattttgttttt

SEQ ID NO: 294 - DNA, 305 bp, Homo sapiens
  misc_feature 231, 236, 237, 242, 253, 265, 273, 299: n = A,T,C or G
aaagcaatctggcatggtgtcctgtagtgaagcagaggatcataacataagtaaactctctatgggtggaagttggagagaaggacattttggctttgtacatgaaaagactctccagatagaaacagattctgcccataagtgaaataaaatgctttgtgggggtaatgagtgacttatagtattcaggcagatgttacataactgctaattaagtttccctggattgantttanncaaanaattgaaagtngattttggtcangtgtcagnaaactactgcctataaacccatatcntaccca

SEQ ID NO: 295 - DNA, 397 bp, Homo sapiens
  misc_feature 304, 315, 356: n = A,T,C or G
cctatctggttggcctttttgaagacaccaacctgtgtgctatccatgccaaacgtgtaacaattatgccaaaagacatccagctagcacgccgcatacgtggagaacgtgcttaagaatccactatgatgggaaacatttcattcccaaaaaaaaaaaaaaaaaaaaatttctcttcttcctgttattggtagttctgaacgttagatattttttttccatggggtcaaaaggtacctaagtatatgattgccgagtggaaaaataggggacagaaatcaggtattggcagtttttccatttncatttgtgggngaatttttaatataaatgcggagacgtaaagcattaatgcnagttaaaatgtttcagtgaacaagtttcagcggttcaactt

SEQ ID NO: 296 - DNA, 447 bp, Homo sapiens
ccatcctcgatgttgaagttgtcgtggggcccgaagacgttggtggggatgacagcggtgaaggtgcagccgtactgctggaagtaggccctgttctgcacgtcgatcatcctcttggcatacgagtacccaaaattgctgttgtggggaggcccattgtggatcatggtctcatctatcgggtaggtcgtcttgtcagggaagatacaggtggacaggcaggacaccaccttgcgggcgcccacctcgaaggccgagtgcaggacgttgtcgttcatgtgcacgtttttcctccagaagtccaaattgtatttgatattccggaacaggccccccaccattgcagcaagatggatgacgtgtgtgagttggaccttctcaaacagggcgcgggtctgtgctgtatccgtgagatcggcgtctttagaggagacaaacacccagtcc

SEQ ID NO: 297 - DNA, 681 bp, Homo sapiens
  misc_feature 426, 432, 634, 668: n = A,T,C or G
aaataacagcatgtaaaatattaaaatacaagctttcaaaaataaatacataaataagtagaaccctcgtaagaaatagtcaaacacattaagtcctttccagctgtccctagaaagctgctgttctctttttcattttcagctctggtaagggcagggaccaccctgcaggaagtgtcaatgatacgctgataagcttcttacttctctcctgtcagttggtgctccccctgtgatgagaaaagggttactgttgcaggtgctaaggaaggctgctcttctgtcactctgaagttgcttggagggatgtccccatgcagactctctcccagccctccactcagggaaggtctgtctgtacccactgccttctatagcagaaaacttgcactcctgaatgctttttttttttttcaagaaagaagnggctgnggactcaactagattcttggtttgaaaaagccaaaacatattggtcactgattgtcacattgggttagaaatgtccattcatgatctcccttaagctgcacacaaccctatgaaataactaccattatctaccctattttgctaaagctcaaagagattaaataatgttgacagggatcttagccttgaactcactgaaggngttactgcaaagttctgctcttcaccaagaaggnttacaggccaaag

SEQ ID NO: 298 - DNA, 353 bp, Homo sapiens
  misc_feature 68, 72, 169, 182, 262, 263, 264, 269, 275, 335, 343: n = A,T,C or G
cctggcttaagaccagacatttgaagaaggctccaggcagggaaaggaaaggagaggccagccccacnctgncccctccctgcccccacgtctccagcaacacaaggcggccagtggaccgtgaaccatttatttccaaactataaagaaacctgctctctgagaaaanacactgcccaggngatgaagctccagcccctggaggtccaaaacccagtccaaactcagtccctttagaaagctgctgtgccttggaaatgannntcggntgtcanagcctgggaagtggtgggaagaaccagcccactcccctctcctgctgcgattccagcgcncgttgggnccagatctgg

SEQ ID NO: 299 - DNA, 560 bp, Homo sapiens
aaagttcaaggactaaccttatttatttgggaaaggggaggaggaaggaaatgatatggtacccagacactgggctaggctgcaactttatctcatttaatactcccagctgtcatgtgagaaagaaagcaggctaggcatgtgaaatcactttcatggattattaatggatttaagagggcatcaatcagctcaactcaagatttcataatcatttttagtatttagattgtgcctcaaagttgtagtacctcacaatacctccactggtttcctgttgtaaaaaccttcagtgagtttgaccattgtgctcttggctcttgggctggagtaccgtggtgagggagtaaacactagaagtctttagtacaaaactgctctagggacacctggtgattcctacacaagtgatgtttatatttctcataaagagtcttccctatcccaaggtcttcatgatgccagtagccatatatgataaattatgttcagtgataacttagttatcagaaatcagctcagtggtcttccccgccatgattcacatttgatgagttttt

SEQ ID NO: 300 - DNA, 165 bp, Homo sapiens
  misc_feature 120: n = A,T,C or G
aaaaactacataggggtgtgtgtgtgtgtgtatgtttattttatacacacatatttgtatattctaatatattactaaggcaattttaatgaattaccatgtatataaaaaaatatctgncacttggcacacaggtttgtatgtatgtgtatatatatatgtatg

SEQ ID NO: 301 - DNA, 438 bp, Homo sapiens
aaaatatatgtatttaaaaacaaaaagcaacagtaatctatgtgtttctgtaacaaattgggatctgtcttggcattaaaccacatcatggaccaaatgtgccatactaatgatgagcatttagcacaatttgagactgaaatttagtacactatgttctaggtcagtctaacagtttgcctgctgtatttatagtaaccattttcctttggactgttcaagcaaaaaaggtaactaactgcttcatctccttttgcgcttatttggaaattttagttatagtgtttaactggcatggattaatagagttggagttttatttttaagaaaaattcacaagctaacttccactaatccattatcctttattttattgaaatgtataattaacttaactgaagaaaaggttcttcttgggagtatgttgtcataacattt

SEQ ID NO: 302 - DNA, 172 bp, Homo sapiens
ccaaaacaggagtcctgggtgatatcatcatgagacccagctgtgctcctggatggttttaccacaagtccaattgctatggttacttcaggaagctgaggaactggtctgatgccgagctcgagtgtcagtcttacggaaacggagcccacctggcatctatcctgagttt

SEQ ID NO: 303 - DNA, 552 bp, Homo sapiens
ccagcctgttgcaggctgcttcgtagcgggcgtcggctgcggacttcccttcccgggtctggatcttttcatcctaccagatgagaaagggaatgagtgaatggagtgaccccgcaccctgtcactttcctgagacatgactgccaggaagaagagctgctctggtctccatcagggctggcaggacaaactgaccagtgagtcagtaggcagagttcacactgaaaaagggcacaagggctgtcccacaatgggaggaaatggggtctcagaacttctacttctctgaaaactaagacacaattgggacaaccaccacccccgtgtgagatttctcacctcgagacaggacaagatgaagttcacggcttcttctggggtaaagaccttgaagagcccatcacaggccaacaaaatgaacctacaacaccagggagaaatataaacgggttttaggcccaaccaaaaaataaaaaataaaaaaagggcctggagatggagataaaataaatatttgtccaactattcaaaggctaaggtttttttttcttt

SEQ ID NO: 304 - DNA, 601 bp, Homo sapiens
cctttgattcttggtagtacattgcatgtaaaatgtttataagaagctacttttccttcatgggaagaaattcccacatgagattcataaattcttagactccgtggcttctttggtccggaatgcttaaactcatatgagtgttctggatcccagtgtatccaatcataattcacattatcaccttcacgaaccacatactttgcccacggtgaaatacgatacaagatctctccgcttttactagtaataactacctttaatttggatccatgaggcacgagtacagatttattctgctttggtgggatatacagctcccattttccataatccagttttttgtatgggtacgaaaatggattccaaccattaaaatctccagtaagaaaaactccttctgctcccggggcccattctttgcagtataaaccaccatcagcacatctgtggacgccaaatgattcatagcctctggaaaacttatcaataccaccttcattttctccaatgttcttcaaaatttggctaaactgcttatacctgcgctggaagtccacggcgtagggcttcaagtaccggtcgatctccaggagtctgg

SEQ ID NO: 305 - DNA, 401 bp, Homo sapiens
aaataacagcatgtaaaatattaaaatacaagctttcaaaaataaatacataaataagtagaaccctcgtaagaaatagtcaaacacattaagtcctttccagctgtccctagaaagctgctgttctctttttcattttcagctctggtaagggcagggaccaccctgcaggaagtgtcaatgatacgctgataagcttcttacttctctcctgtcagttggtgctccccctgtgatgagaaaagggttactgttgcaggtgctaaggaaggctgctcttctgtcactctgaagttgcttggagggatgtccccatgcagactctctcccagccctccactcagggaaggtctgtctgtacccactgccttctatagcagaaaacttgcactcctgaatgc

SEQ ID NO: 306 - DNA, 313 bp, Homo sapiens
aaactgactatggattccttgaaggtctggcagttgttgatgatggcgatcatgtactgaacgtagcagtgagggtgctgccgattcctcaggtgctcttctttatacagctgcgcttcatctttatatctgaggacagacaggcttcggtcagacagcactaagggcaacatggagctgtttcaaatgccacgctgacgtcacgcctggcctgaaatttcacatcactaacatctgaccggatgagcctctaaaaataaaacaatctttagacgatccagactaatggaaggacagagaggttgattacttt

SEQ ID NO: 307 - DNA, 366 bp, Homo sapiens
  misc_feature 11, 219, 232, 313, 321, 327, 342: n = A,T,C or G
aaagatgctgntaatgaacattacggacaattcatggtgtggctagttggtaacacttcagctgatttttcttatgagatggaaaaaaaaaatcagccaagtaagggcacatcttcacttcatttataagtcagcatccaaggtaaaagaattctctgttggacttgacatcactcccatcctctgatactcgcctactctcttctcaaagaagttagntctttccttccantgaaatattctcataaaagtcaaatgggttctctactctgaaaaccttgctaaaacccaattccagcataagtttgtctgncacaaacncaatgnattgcttcattaaantgcaattcatcccaatgagcttcc

SEQ ID NO: 308 - DNA, 534 bp, Homo sapiens
  misc_feature 486, 529: n = A,T,C or G
ccagctatcagctgatcgtcttctgtctggacgctcgtcctgcttctgacatcaaaatcttctgtctcaaagtcagagtcatccaactcctcaggggtccttatcatcagcactgctttcctgatgtcccggatgccatcatataccaggcgggaagcatcgataaactcattctcatccatgggctgggcagggtccgagctgagggcttccacggctgcttctacttgctcagtaaaacgtggcatgactgtgttggagagcagcttagtggcttccagaaccttctctgtgtagactcctggctcatagtcgtccatctctgaggtgactacgtgaatgacccgggctgcccggcctcgaattgcaccagctgtgcggccaggccatccacatccttctcttggagagcaatgacacatttggtcacatcttccaaaatgtgattctctgagacagccaagaagtcatcaatggaagtaatgncatcgacagcatctgtgagaacaccgacttgtttttccattgntcttt

SEQ ID NO: 309 - DNA, 164 bp, Homo sapiens
catactccttacactattcctcatcacccaactaaaaatattaaacacaaactaccacctacctccctcaccaaagcccataaaaataaaaaattataacaaaccctgagaaccaaaatgaacgaaaatctgttcgcttcattcattgcccccacaatcctagg

SEQ ID NO: 310 - DNA, 131 bp, Homo sapiens
aaaaatcatttatctttcggtgcttcaacatgatgccaaacaaaaatctactgaataaaaatagcaaggaagggaatcaaacatttataagatatatttattatttttctgaccaaagtgcaatgattttt

SEQ ID NO: 311 - DNA, 626 bp, Homo sapiens
cctatgtgcgccagtttcaggtcatcgacaaccagaacctcctcttcgagctctcctacaagctggaggcaaacagtcagtgagagtggaggctccagtcagacccgccagatccttgggcacctggcactcaagcactttgcacgatgtctcaaccaacatctgacatctttcccgtggagcaacttcctgctccacgggaaagaggtcgatggatttacccctggacccataagtctgttcatcctgctgaagtcccctccccattgctccttcaagccaaaactacactttgctggttcctgtcccctctgagaaaggggatagaaagctccttcctctatgtcctcccatcgagatctgttctggggatggagcttccaacttcctcttgcagcaggaaagaatgctgctcacccttctgtcttgcagagtgggattgtgggagggattggcagccttcttctccaccacctgtccagcttcctcctggtcagggctgggacccccaggaatattatgttgccgtgtgtgtgtgtgtgtgtgtgtgtcttcttttagggagcaggagtgcatctggtaattgagggtagatgttgtgtgtgctggggaggggtccttctgtt

SEQ ID NO: 312 - DNA, 616 bp, Homo sapiens
aaaccaaagaaattaagaaaaaagacttcattgcttgaatgacgcgaacagctgtctgagtcacctagactttaacaccacctggggccctgggaatgacgctgacgagagatctgcacatagtaggcgtgggctccaaatgtgctcatcagctgacttcacatcctcacaagtcagcctcagatatgacccaagggatacgtaccatctcttcttgaaacagcgtgtcaaattatatatatgtatgcaaaaaagagtaatgtactaagcaaaccaagtttcgtctttttcttctgaatctggttttaatgtgacctgtcatccccatctttcgaatttatgagctccatcttctctagactgttaacttcttgaggaaaacatgctattttaccacctttcactgctgaatccctagcccttaagcacagtctctggcacagaataaatacgaaatgaatgagtgaatgaatggatggatgggtgaagagaaaaggcaatgcacaagatttacctatcaaaatccaccaatggtccttaaaaatggttttgtcagtagagatgctgaatatattcatataatacatttatttcaatactattaagaattctagtg

SEQ ID NO: 313 - DNA, 553 bp, Homo sapiens
aaaaaatggcagcattgtacttgaatcagaaagcttactgggatttcctcatcgaaagtagagattgcagctaatcctagtaccttttgttagtaattacttaaggcacagtgcaaagttgaaggactgttttggtacaaactcaagccagctacatgtatgcttgccttggtatccttgctagagcacatgcgggtataataccgtattatacacaacaaggccaccctgttgtatctgtgttacaattaaacatcagtcccagaaagtgaaccctagtcatttattataggtgcccacctctgacttggaacaaaatgccactccattcatgttcatttttgtcctggagaggatttatttcctaaaagattctgaaagccaacaaatcaatgtagttcttcatagagaacttaagagtaaggctcaaaatggcctcaaaatgggcttcttggatgacttccaacagtgactggccttctcaacactgcagatgtctgagcactaccataacctaacgaagtgaggaaggaggaggcaaattggtattttt

SEQ ID NO: 314 - DNA, 330 bp, Homo sapiens
ccagcgactccagcggtggcagcaggcagtgcacgtactctgggcctcccaccagggtagtgaaggttcccagctgttctgccagggccaggaggacctcatcttcatcatagatggtatctgtaaggaaaggcagaagctcacttcgggtcctttcaaccccaagggccaaggcgatggtggacagcttcttgatgctgttgaggcgaagctgaacgtcctcattgcggagttcgtctatgagcaccgcgatggggtacagcgagtcgtcgccgtcggccgccgccatcttggctccgtccctttcctgtcagactgcggccagcgctg

SEQ ID NO: 315 - DNA, 380 bp, Homo sapiens
aaaaatgacattgcgtttagcttattgtaagaggttgaacttttgtattttgtaactatctttaagcccttcagtttataattcatataaaatgccttttgtatttaaaataatcctattttaatcagtgcatgaaatttgcttttttaaagttcatttgaatgattattccttccctctaaagaaatgattttggtaatgttgagaggtaccttaccacaaatcctaactgtaagtgtattcatggttattttcaaaagaattatgactcttccccaaaagaatcctaaaaaacttgtaataaacctataaagctgatttgcatatttacaaaattttgaatagcaaatataggcaactcatatatgtatataattttt

SEQ ID NO: 316 - DNA, 222 bp, Homo sapiens
aaactacagagggttttccagctattatttcctttagtttctaaaagtaacgacttatattaatgttttataaaagatagtgatgaaaaaaaggtaatgctgaaataaaggcgcttttagaaatatttaaggacaacataaggtattaatattggaaaaaaactgtacatattttcaagcacaacactgaaatattgcagcagtgtttaactgaattgtttt

SEQ ID NO: 317 - DNA, 490 bp, Homo sapiens
ccttgaatgagcgtggagagcgattaggccgagcagaggagaagacagaagacctgaagaacagcgcccagcagtttgcagaaactgcgcacaagcttgccatgaagcacaaatgttgagaaactgcctatcctggtgactcttcttaagagaaactgaagagtttgttcagcagtttttacaagaattcgggacctccgcttgcttctttttttccaatatttggacacttagagtggtttttgttttttcttttcagatgttaatgtgaaagaaagggtgttgcatttttacatttccctaatgatcttgctaataaatgctacaatagcatcggcttcattttgggtttttgcctcctcccactgtgtgtatgtgtgtatatgtatgttttgaatatgttttctttattaaaaaatattttttgtagtttgaatatgaaatttggaccaaatgataaactgcgctgagtctaaactggcaacatgta

SEQ ID NO: 318 - DNA, 340 bp, Homo sapiens
cctggagtccaataaccaccccctcataccacaccctgtgcatacaccagccaagcctttcctggtctgggaagggaagagaaaaaagacgcaggccacctgggggttctgcagtctttggtcagtccagctttctatcttagctgcctttggcttccgcagtgtaaaccttgcctgcccggaggcaggaggcccagctggacctccgagggccatgagcaggcagcagccatcttggcctcaagcttgcctttcccttgagtccctctctcccctcggctctagccagaggtgtagcctgcagatctaggaagagaagagctggggaggaggatgaagg

SEQ ID NO: 319 - DNA, 373 bp, Homo sapiens
aaagatgctgttaatgaacattacggacaattcatggtgtggctagttggtaacacttcagctgatttttcttatgagatggaaaaaaaaatcagccaagtaagggcacatcttcagttcatttagaagtcagcatccaaggtaaaagaattctctgttggacttgacatcactcccatcctctgatactcgcctactctcttctcaaagaagttagtctttccttccagtgaaatattctccataaagtcaaatgggttctctactctgaaaaccttgctaaaacccagttccagcataagtctgtctgccacaaactcaatgtattgcttcattagagtgcaattcatgccaatgagcttcacaggcaagg

SEQ ID NO: 320 - DNA, 509 bp, Homo sapiens
aaaaacaaaattaaattttcatttcaattaagaccccttttggcattttgcttacttattctgccctttggttaacagcatcagcatcacattactattttatattgcatatatgtagcatttgcttccttaagttttcaacatatcatttatatttaaaggcagacactgagtcagtattaatagattaactaaactgcactgtaatttagataaaattactgtgtctcactgtgtattacatgcaaaatccacataaattgtcatttaaccaacagtactgcacgagcgaacatctcgatatatgaaaactgcatcatcaattcaacgttttggtacttgaaactgcatcataaatgcaacattgtcatatgtgaaaacgacaccctaagtccttctttttaaaaatgacattgcgtttagcttattgtaagaggttgaacttttgtattttgtaactatctttaagctcttcagtttataattcatataaaatgccttttgtattt

SEQ ID NO: 321 - DNA, 617 bp, Homo sapiens
ccaaggccccttttgcagcccacggctatggtgccttcctgactctcagtatcctcgaccgatactacacaccgactatctcacgtgagagggcagtggaactccttaggaaatgtctggaggagctccagaaacgcttcatcctgaatctgccaaccttcagtgttcgaatcattgacaaaaatggcatccatgacctggataacatttccttccccaaacagggctcctaacatcatgtcctccctcccacttgccagggaacttttttttgatgggctcctttatttttttctactcttttcaggcgcactcttgataaatggttaattcagaataaaggtgactatggatataattgagccctctggtccaggtctcagtttacctaatattacctcagaaaggatatggagggaagatgatctttttgccaggtctgacttttcttcctgctccgccctccattaacgctcagtaccctttagcagctgacggccccacgttctactccatgcttggcttcctttccaactagctctttcatatattttacttgctagtatctccattctctctaaagtagtggttctttttgcccttaaacttaaattttt

SEQ ID NO: 322 - DNA, 403 bp, Homo sapiens; identical to SEQ ID NO: 293

SEQ ID NO: 323 - DNA, 298 bp, Homo sapiens
ccagaattagggaatcagaatcaaaccagtgtaaggcagtgctggctgccattgcctggtcacattgaaattggtggcttcattctagatgtagcttgtgcagatgtagcaggaaaataggaaaacctaccatctcagtgagcaccagctgcctcccaaaggaggggcagccgtgcttatatttttatggttacaatggcacaaaattattatcaacctaactaaaacattccttttctcttttttcctgaattatcatggagttttctaattctctcttttggaatgtagatttttt

SEQ ID NO: 324 - DNA, 78 bp, Homo sapiens
ccatgggaaggtttaccagtagaatccttgctaggttgatgtgggccatacattcctttaataaaccattgtgtacat

SEQ ID NO: 325 - DNA, 174 bp, Homo sapiens
ccatcatggtcaggaactccgggaagtcaatggtcccgttcccatctgcatccacctcattgatcatatcctgcagctctgcttcagtggggttctgtcccagggatctcatcactgtccccaactccttggtggtgatagtgccatctccatccttgtcaaagagggagaagg

SEQ ID NO: 326 - DNA, 679 bp, Homo sapiens
  misc_feature 83, 606: n = A,T,C or G
aaaactgaaatacctcttaaaataatttgatccccagcgtttgctctttttgaagtaaccaacttactcttaaaaaggatggntgccaagatggaaagtcttactgggttttcatgttaacctattctttggacataactatgaattttgtatacaatgcacttcatgaaaagttgtggctcccccagattgcccacaagtgtgatcttgaagtcctaaacatttgtccatgtaagcttcaaaacagcgttaactgagttattcaagtagcagtacttaaagatacaattcttgaagcagtttcaatggtttctgatccaaataatcagtttctgaacattactacttcacataatagagtccatcttcagtttcttctcactttctctttcccttttgggtttcctttttgtggcctgaggccaccagttctttgggtactatcaagatacttccatcatgggtacactggagagcatagtggttgggattgactggcctaccttggtcatctcttaatctactaaaaatatcatgataaaggtcatgcagtttctgtttcattatgttaatagctttggtacattgtgcttgctctctcttaanagtttccttctttgcttgcaagttacatacatcatcttctaaattcaaaattatgtccattttggcgtttacc

SEQ ID NO: 327 - DNA, 619 bp, Homo sapiens
  misc_feature 137, 490, 493: n = A,T,C or G
aaaataagttactggtaaatggagttgcattctatagtcacttaataaatattaacaaaatatttataactggaaccttaatgaaatgtatcatcaaatcaggtaaaagcaacttgtccgcagttaccaaagcctanatacgcgttagatgcgccttttccggcctgtgcgtctgctctggttcctctcaggcagcaaagctggggaaggaagctcaggcaggagcctccccgacgccacaacggcacaagcagcagctaaagcaccgcactttgctctactaaccttttacttaaatgaggttttgccaaatccacatctggaaccgcgtcacacccatttgcaaggatgtttgttctttgatgaaactgcatctctactgcacatgagggctttcattgtaggacaagaggagagttcgtttatttttgtaactgttttacatgttccgattagttaatcggtagcttatgtcatttgctatgcctgnagncttctaatctctccttactaaaacattacttcaaatttgaattgacccttggttataatttatttagccgggatttgtgtgtcattgtagagcaactctaattcaagaatagtgacaacttttaag

SEQ ID NO: 328 - DNA, 132 bp, Homo sapiens
aaatccaaatacaaaagcatagtctctgcaagattttgttctttgaatttcttgatattgtaattgattattgataactgtcatcatgaaattatctctcaataataagataaataaactagcatatgaatc

SEQ ID NO: 329 - DNA, 854 bp, Homo sapiens
  misc_feature 801, 840, 841, 849: n = A,T,C or G
ccttgaggtaactattgcaaaatatacagtgtaagttcagtctgatggaaaccccagattcatcaaggatacaaatctacagtagcccaatggcggtttcatagtgtataatttattatcaataaaattaactccgttacaatcagcattcatttcctccaattaaaattaagcataaaccctaggtagtaaccttctgcacatatgtatagctccgaatttcctcactgttcgtctggtgcaaaaacaatattcaagcttgtctgattatgcatattttctttaatcatatagattatatatacaatagacaagacaggactatatagataatggacagacttaaatgcccgcatttttaaggtggagaaaatgatgaatctatgcatccccgagaacacttaaaatttttttttatttcactgggaaattcttacagctactttacaatcataggttaacagcctagttatacagaagacatattccactacagagctatactctatgcaactgttttttcccctcataaacaacctgagttcaaattgaattctatcttccacaatcacaatgggtgcatcacccagtacacagaagtttgaatcacaaaacataattaccacaataaaacacagtgttcaagtatcttggcagagcaatctgccgcacaaactgcaaattaaattaactacacagactaaaaactatacagcctaccatcacagttgtgcattataaaaaagggagtttctttcctttggttttaagtcaggaacagggtaggattttttaccctcnggccggggaccacgctaaaggggcgaaatttcttgccannatattccnttcac

SEQ ID NO: 330 - DNA, 299 bp, Homo sapiens
ccaatgaataactgactttataatcctgggcaatcagcttttggcgggttgtaagtgcttctcgacacttttcactcatggattcttcaaatttatggttaaagaggcacttatacactctgccctcaccagcttgtgtattttcacaaaaacgctcccgatcatctcggcaagcaaaatataaatgccggtctaagtgaaagtcatccgatgacagctcagccacccggagaatggctttcttgcagagttcagaaacttgaatcttgggttctctttcttctgcttctttcaccagg

SEQ ID NO: 331 - DNA, 573 bp, Homo sapiens
aaagatatgaacagcttaattttccgtgtgattatctaattaaaaaagaaaaacaaaacaagcaaaatgttcaagttaaaaaaaaaacataccgggtgagcaatgcactaaaattatccacatgaaaacaaatggtctgtaatcttataaaccaacatagcatttcactgtcaacaatgtgaaaatttaatatcttctcaaacaggcataagatgaagaagtgctattttttaattgtaaaaggaacttatgtaatgtaaaattacattataatttttcattccgaattgacaaatgatttcaaaaacaaggatcaaagtttgactgcaaatagtaatgcaatataatttcataaaaatccttcaatttctatttttttccttttctgtagttgacatatgaagaccacttcaatttctaaaaaagggaaccattccaattttccctccccaagaaaatgtctcacaattacaaagtagaaaaacagccgttcataaatgcaaaaaaattctgatttatatatgaaataatttctagatcaattcaacatatttgatgacatttgttgagttt

SEQ ID NO: 332 - DNA, 555 bp, Homo sapiens
aaatttgaaagttgtaagcactgatgttaatgtgattgatcagcatgggcatatgtaaaatgtccttttctggttgcctctctatgctattgtgttcagatacttacaccataattaaacagtaagttatagacttgctgagtttggcatagatagtgcgctcatttaatctgtgcctctcaaaacttcagaatattagcatattaccacaaataatttttggtgaaactattgagatattaaaatttttgaaatcactactgttacctgttatagaaaatagtgttggcttagtctagtctctgtgtaactggttacattttgatggttgtctatactcaactggatatgtgtatgtaaattagaaaatacatacctatccagacataaatgctaagtaacatttttttcttcctccaactacataatttgtagctcatcatttttccttaatcctttcctaacttgtcgcagcagtttgaatttcccagatatttatgtttgaacataatggctcagaatacatatttgaacatcatagttgtatatattttt

SEQ ID NO: 333 - DNA, 460 bp, Homo sapiens
aaatttctttcaacagtctattggggtccaaaaagcatatatcaaaacaaaaataacaaaagcaaaacaaaatgctacatgtaaaagctaaagaaagaaaatgcagcatattcaggttctttttcttgaggtacctatataaatttaatcacctgccccaaagtcctctcgttaggttaaaaacacaatgcgtcctggggagccaattgcccggcacgtcttattactgagaaagtgcaagaatgctgatcatcttatgcagcatactaaaggatgatttactctttacaaaatagagcttaagtatcaacctgatggaagttagaaaattaaaaacatttaagtagaatcatctctctctctatttttgagatcctgcagcaaaaagcctcccaaatcaactttcaaagttctgccattaaggaatgttggttctcttgtaaaattcagagatctcttt

SEQ ID NO: 334 - DNA, 190 bp, Homo sapiens
ccaaggaaggctgtgctctagcccatctgaccctgtctgcaaaccacctgggggacaaggctgatagagacctgtgcagatgtctctctctgtgcccctcactcatctcactggatctgtctgccaaccctgagatcagctgtgccagcttggaagagctcctgtccaccctccaaaagcggccccaagg

SEQ ID NO: 335 - DNA, 394 bp, Homo sapiens
aaatttggacagacttctagcggacagttacttctcaagaattttctatacaaaagctgtgccaggcatatattttctcaccaggacacatggggcagcggacccctggtgtcagtaagaacacacccagaatgatataaccagatatttttcagtttctaaattaaggcatattcaaaaaattccatgtacaagtttacaccacttttctaagttactcaccaggtaattaaagcagattcacagatgaattactctcagtttaactatatgcaacaaccatgccaataacttttcttctaaattttgcataataatggttaaaaaaagtggtagtttaactatcatgttcacaattgtcatttttcaaggcagtagaagaccaagacatttt

SEQ ID NO: 336 - DNA, 429 bp, Homo sapiens
aaaagctatcaccattgtagtagaatcatccttcttttttgaaatttgaagcatcccaggcttaaaatcttgtgtttcagaaagacagtttataccatgactgcttaattatccccccaaagaccttctgattgaagtcatgtacagttcagtggcctaaattctctgcctttttaacttgctttgcaagcctactctgaaaataagttatttagtcaagttattctcaaagatgtcccagttgcctagaaaggatcaaatggaacatttgacacacatactcaaaaaaatgtaactgactataaacactttaacctaatcatctgtatcaaactttctaaaaatcaaatctcaggattgttccactttagagattctatgtaaagtttatataactatacttgtcaaatagcacctatctatgcattt

SEQ ID NO: 337 - DNA, 373 bp, Homo sapiens
aaagatgctgttaatgaacattacggacaattcatggtgtggctagttggtaacacttcagctgatttttcttatgagatggaaaaaaaaatcagccaagtaagggcacatcttcagttcatttagaagtcagcatccaaggtaaaagaattctctgttggacttgacatcactcccatcctctgatactcgcctactctcttctcaaagaagttagtctttccttccagtgaaatattctccataaagtcaaatgggttctctactctgaaaaccttgctaaaacccagttccagcataagtctgtctgccacaaactcaatgtattgcttcatcagagtgcaattcatcccaatgagtttcacaggcaagg

SEQ ID NO: 338 - DNA, 366 bp, Homo sapiens
ccatccccttatgagcgggcgcagtgattataggctttcgctctaagattaaaaatgccctagcccacttcttaccacaaggcacacctacaccccttatccccatactagttattatcgaaaccatcagcctactcattcaaccaatagccctggccgtacgcctaaccgctaacattactgcaggccacctactcatgcacctaattggaagcgccaccctagcaatatcaaccattaaccttccctctacacttatcatcttcacaattctaattctactgactatcctagaaatcgctgtcgccttaatccaagcctacgttttcacacttctagtaagcctctacctgcacgacaacacat

SEQ ID NO: 339 - DNA, 319 bp, Homo sapiens
ccttccctccccaccaccatcaacctcttcaaaacctactccctccctctaagtatctctcaacacagtatgtctggggctagatttcaaaacccacgtaatgaaaaagtcagttttacaagcctaattttgttgtttttttttttatatcaattaacgttaaaaattgcatcaactatttaattcatgaggatctttcatattaaaatttaaccttaagattcaaccgccatgtgcttttataaaggaaacattttttagagacgtctgagctcacttttacatggtggtgcctactgccgttaatgtttgtgatttt

SEQ ID NO: 340 - DNA, 278 bp, Homo sapiens
  misc_feature 30, 31, 44, 58, 70, 71, 106, 140, 148, 156, 164, 171, 174,180, 187, 190, 196, 219: n = A,T,C or G
ctaataaaatgaattaaccactcattcatnnatctacccacccnatccaacatctccncatgatgaaacnncggctcactccttggcgcctgcctgatcctccaantcaccacaggactattcctagccatgcactactnaccagacncctcaacngccttttnatcaatnggncacatnactcganacntaaatnatggctgaatcatccgctacctncacgccaatggcagcctcaatattctttatgctgcctcttcctacacatgcgggcgagg

SEQ ID NO: 341 - DNA, 400 bp, Homo sapiens
ccagcatggggctgcagctgaacctcacctatgagaggaaggacaacacgacggtgacaaggcttctcaacatcaaccccaacaagacctcggccagcgggagctgcggcgcccacctggtgactctggagctgcacagcgagggcaccaccgtcctgctcttccagttcgggatgaatgcaagttctagccggtttttcctacaaggaattcagttgaatacaattcttcctgacgccagagaccctgcctttaaagctgccaacggctccctgcgagcgctgcaggccacagtcggcaattcctacaagtgcaacgcggaggagcacgtccgtgtcacgaaggcgttttcagtcaatatattcaaagtgtgggtccaggctttcaaggtggaaggtgg

SEQ ID NO: 342 - DNA, 536 bp, Homo sapiens
aaagaacaatgggaaaaacaagtccgtgttctcacagatgctgtcgatgacattacttccattgatgacttcttggctgtctcagagaatcacattttggaagatgtgaacaaatgtgtcattgctctccaagagaaggatgtggatggcctggaccgcacagctggtgcaattcgaggccgggcagcccgggtcattcacgtagtcacctcagagatggacaactatgagccaggagtctacacagagaaggttctggaagccactaagctgctctccaacacagtcatgccacgttttactgagcaagtagaagcagccgtggaagccctcagctcggaccctgcccagcccatggatgagaatgagtttatcgatgcttcccgcctggtatatgatggcatccgggacatcaggaaagcagtgctgatgataaggacccctgaggagttggatgactctgactttgagacagaagattttgatgtcagaagcaggacgagcgtccagacagaagacgatcagctgatagctgg

SEQ ID NO: 343 - DNA, 646 bp, Homo sapiens
aaaacttctattcatcaaaagacataaagaaaacagtcaagccacagactaggtgtaatatctcaatacatatatccgacaagagaattgcatctagaatgtataaagaatttctatgacccaattatagctatcagggatatacaaattaaaaccaaaatgaaacatcactacacaccgattggaatggttaaaaaggaaaaatactgacaacaccaatatttgtaaagacaggaggtaccagaactctcattcattatattcataaattgacaaatataaaaactgctatagtagggcagtcttccttagaaagggattgtgggcatgacagagaacaatattaatctgtccattatattccttaactgtaaaatggagaccatatgttccaccagcttcacttggtaattatgatacatggctattaagagactcaaatgactccatttcatcaactaatatgccctgtcaattctacttctaaagtatcccatgttctatccaatgtcataccactatcataatttaagtgttcataactctctataatatttcaataatctaactggtctcaatgcctgtagtagaaattgcagattgggctccccaatttctgttccctaggaaggctgagaaagctttt

SEQ ID NO: 344 - DNA, 383 bp, Homo sapiens
cctgcaccccagtataagggcctccccagctgagtaagaagctgcttcccctcctctcataggccaagcctattgtgtgaaaccatctcatggtcttggtgacgtagaccatttttgaaaccgtctcatggtcttggtgacgtagaccgtttgcttctttaactccagccgcggaatgacattagtggaaccgggctagggaactgctggaagttcaggatgccaccaccttgaacacctaggccagggatccccaccatgtcccgggtttctttcttcgagagtatagaaccgttcattcttgctttgtgtcccattccatctcttgaaaaaatgtagtctttgaatgtgtgaaaatctagggacattcaatctagtctttt

SEQ ID NO: 345 - DNA, 263 bp, Homo sapiens
cctccccttcccctttgctggtgggaggagctcgtgtgctccttggccgcttactggaagggcgtttttcagagctgcagggacagggtgagcagctgaagggctaggagggaagccggcccccgctctgcagaagctgcatttcagctgaatctgtgtttcagcctcagttggttgcaccgttagcccctctcctcccggatggtcatgtttttgtcacattagagaataaacagccacacacacatttttttttttccttt

SEQ ID NO: 346 - DNA, 132 bp, Homo sapiens; identical to SEQ ID NO: 328

SEQ ID NO: 347 - DNA, 564 bp, Homo sapiens
  misc_feature 484: n = A,T,C or G
cctgggtatccagggaggctctgcagccctgctgaagggccctaactagagttctagagtttctgattctgtttctcagtagtccttttagaggcttgctatacttggtctgcttcaaggaggtcgaccttctaatgtatgaagaatgggatgcatttgatctcaagaccaaagacagatgtcagtgggctgctctggccctggtgtgcacggctgtggcagctgttgatgccagtgtcctctaactcatgctgtccttgtgattaaacacctctatctcccttgggaataagcacatacaggcttaagctctaagatagataggtgtttgtccttttaccatcgagctacttcccataataaccactttgcatccaacactcttcacccacctcccatacgcaaggggatgtggatacttggcccaaagtaactggtggtaggaatcttagaaacaagaccacttatactgtctgtctgaggnagaagataacagcagcatctcgaccagcctctgccttaaaggaaatctttattaatcacgtatggttcacaagataattc

SEQ ID NO: 348 - DNA, 321 bp, Homo sapiens
  misc_feature 3, 12, 23, 70, 80, 89, 101, 123, 131, 151, 168, 177, 185,212, 220, 222, 233, 253, 255, 263, 264, 286, 287, 300, 302,315: n = A,T,C or G
gcncatgaacanggagcaacganaagagatgtcgggctaagggcccgggacgggcggcacccatcctgcnacggaacacnttcgggttntggttttgattngttcacctctgtttatatgcanctatttgntcctcctcccccaccccagnccccaacttcatgcttntcttccgcnctcagccnccctgccctgtcctcgcggtgagtcantgaccacngnttcccctgcangagccgccgggcgtgagacncngaccctcnntgcatacaccaggccgggcccnngctggctcccccngnggccctgtgaaanagctgg

SEQ ID NO: 349 - DNA, 255 bp, Homo sapiens
ccatgacagtgaaggggctgttaggaatatcaacaccaccgaagcgcacatagatcacatatgtgcccggcttggcagctgtgtagaagatgtcataggttccatcttcattctcaatgacatcggcctcggcctcagtgccatctggggtcagaaccgtgcaggtcactttacccttcccggcagtcttggcatcaaccacaaagcctacttcttcgccagttttcacagtggaggcgattccaggacccgtag

SEQ ID NO: 350 - DNA, 496 bp, Homo sapiens
  misc_feature 10, 27, 96, 110, 112, 309, 360, 447, 455: n = A,T,C or G
gggcttattngctcacaaaatcattcncttttggaactatggccaattgaagctacacactgaatttattaatacagcattaagtttctttgtgtnaaaaaatctttgtncncagtaataaaaaaagataaggcaagatgcattaaacatgaaaccttctggctcttttcctctgcgtttttacagagccactgatgactatctgcaacaaaagagttaagtttctgattttccgtatcaagcatcttatgcctttgctgtggtaagaattctggccaagcaccctgaaggacagatgctggtgatggnctttggcacttatgctggcaaactgagcttctttcccttgagtacttttgnaatgtacaagtagaagaagtcacaagtataggatggtctggactacgccggccaccacagcaatgaggtcaaagaagccctcaaagnagaagcgnccagatccagttgacaagatacaaagcacgatagaggccca

SEQ ID NO: 351 - DNA, 109 bp, Homo sapiens
  misc_feature 49: n = A,T,C or G
ccatagtgaagcctgggaatgagtgttactgcagcatctgggctgccanccacagggaagggccaagccccatgtagccccagtcatcctgcccagccccgcctcctgg

SEQ ID NO: 352 - DNA, 384 bp, Homo sapiens
ccttcgagagtgacctggctgcccaccaggaccgtgtggagcagattgccgccatcgcacaggagctcaatgagctggactattatgactcacccagtgtcaacgcccgttgccaaaagatctgtgaccagtgggacaatctgggggccctaactcagaagcgaagggaagctctggagcggaccgagaaactgctggagaccattgaccagctgtacttggagtatgccaagcgggctgcacccttcaacaactggatggagggggccatggaggacctgcaggacaccttcattgtgcacaccattgaggagatccagggactgaccacagcccatgagcagttcaaggccaccctccctgatgccgacaaggagcgcctgg

SEQ ID NO: 353 - DNA, 345 bp, Homo sapiens
  misc_feature 19, 41, 59, 110, 124, 131, 230, 231, 239, 245, 247, 273,280, 284, 285, 296, 303, 325, 343: n = A,T,C or G
ccttggtcaggatgaagtnggctgacacaccttagcttggntttgcttattcaaaaganaaaataactacacatggaaatgaaactagctgaagccttttcttgttttancaactgaaaattgnacttggncacttttgtgcttgaggaggcccattttctgcctggcagggggcaggtatgtgccctcccgctgactcctgctgtgtcctgaggtgcatttcctgttgnncacacaanggccangntccattctccctcccttttcaccagngccacancctnntctggaaaaangaccagnggtcccggaggaacccatttgngctctgcttggacagcanag

SEQ ID NO: 354 - DNA, 712 bp, Homo sapiens
ccatctacaatagcatcaatggtgccatcacccagttctcttgcaacatctcccacctcagcagcctgatcgctcagctagaagagaagcagcagcagcccaccagggagctcctgcaggacattggggacacattgagcagggctgaaagaatcaggattcctgaaccttggatcacacctccagatttgcaagagaaaatccacatttttgcccaaaaatgtctatttttgacggagagtctaaagcagttcacagaaaaaatgcagtcagatatggagaaaatccaagaattaagagaggctcagttatactcagtggacgtgactctggacccagacacggcctaccccagcctgatcctctctgataatctgcggcaagtgcggtacagttacctccaacaggacctgcctgacaaccccgagaggttcaatctgtttccctgtgtcttgggctctccatgcttcatcgccgggagacattattgggaggtagaggtgggagataaagccaagtggaccataggtgtctgtgaagactcagtgtgcagaaaaggtggagtaacctcagccccccagaatggattctgggcagtgtctttgtggtatgggaaagaatattgggctcttacctcccaatgactgccctacccctgcggaccccgctccagcgggtgggggattttcttggactatgatgctgggggagg

SEQ ID NO: 355 - DNA, 385 bp, Homo sapiens
cctcatagccgcttagcacagttacagaatgtctgaaggggacagtgtgggagaatccgtccatgggaaaccttcggtggtgtacagatttttcacaagacttggacagatttatcagtcctggctagacaagtccacaccctacacggctgtgcgatgggtcgtgacactgggcctgagctttgtctacatgattcgagtttacctgctgcagggttggtacattgtgacctatgccttggggatctaccatctaaatcttttcatagcttttctttctcccaaagtggatccttccttaatggaagactcagatgacggtccttcgctacccaccaaacagaacgaggaattccgccccttcattcgaaggctcccagagttt

SEQ ID NO: 356 - DNA, 347 bp, Homo sapiens
aaatgagataaagaaagtctccttttgtttttagatggaaaagaaagcacaagttttttctacctgtgaatgaactttggtgacctatatgtgccattcatgcagcatttttgttcatattggcttagaattcagtgcatgaatatcattacattcttatatctaacattcctagttagctttgattcaaaatatacaaaatctgatacatgaatactttgctagattaatgacttgatcatctttggaatgagtaggcaagacgatttttacctattatttctatgttgtgggtaatgttaaaactaaatacagatgataataattgctatttcacagtgatgttt

SEQ ID NO: 357 - DNA, 313 bp, Homo sapiens
aaagtaatcaacctctctgtccttccattagtctggatcgtctaaagattgttttatttttagaggctcatccggtcagatgttagtgatgtgaaatttcaggccaggcgtgacgtcagcgtggcatttgaaacagctccatgttgcccttagtgctgtctgaccgaagcctgtctgtcctcagatataaagatgaagcgcagctgtataaagaagagcacctgaggaatcggcagcaccctcactgctacgttcagtacatgatcgccatcatcaacaactgccagaccttcaaggaatccatagtcagttt

SEQ ID NO: 358 - DNA, 403 bp, Homo sapiens; identical to SEQ ID NO: 293

SEQ ID NO: 359 - DNA, 411 bp, Homo sapiens
aaataaatacttagaacacgacttggctcctacaagcatctggactctaggtctcagtactggagtgtctcacccatgggccccacgcagggacgccacggttccctcccaccccgtgatcaagacacggaatcggctgccgatggttggatcgcaatgcgccccttttctagagccttccccggccatctacaggcaggatgcggctgggaaaaagacaactggaatttctcgaaggttgatggtccgcacggttgaggattctacgtggttctcttggttcccctggtgtgtgtgtgtgtggaggaggccgcggcccttagatcaccttcttgagctcgtcgtacaggaccagcacgaaggcgccccccatgccccgcaggacgttggaccacgcacccttgaagaagg

SEQ ID NO: 360 - DNA, 378 bp, Homo sapiens
  misc_feature 276, 328: n = A,T,C or G
cctcttcaggggcccgagccagggacagggccttggtttccttctccctggcttctgcctcagctctgtccctctcatccgcgtatttggaagagatgtttttctcctcggctaacaactgatcaaatttcctctgcttcttttccaggttggacacgagttgccgctggttgtccaaatcaacaaccaggtcgtccagctcctgctgaagcctgttcttggtcttttccagtttatcataagcggccgccttctcctcgtactgctgggtgaggntctcgatctccttctggaacctcttcttcccctcttccagagcttccacggngctggcaaagtcctgcagcttcttcttcgagtcggagagctggatgttga

SEQ ID NO: 361 - DNA, 372 bp, Homo sapiens
aaatactgggggccattaagagtggatgtagctaagagcttagctaacattgccttttcactctatttttctcagatattgtaagcattctgtttttcaatattgtagttaattttttggctttcaacagcagccctagtaatggtggagttgttaattaatgtgtatattgtactgaatttctgtcagttaaggggttcactgctttggtggaaattggtggaaattgctagcaggttccacgatgtttatttttttctccatgttgtatatcattaccatttcacatacgcgtttctatttttcttcctctcctcctgatctccttaaaaatgaatctagagttggtggctttttccccctcctctttgg

SEQ ID NO: 362 - DNA, 544 bp, Homo sapiens
cctgagtcacctagcatagggttgcagcaagccctggattcagagtgttaaacagaggcttgccctcttcaggacaacagttccaattccaaggagcctacctgaggtccctactctcactggggtccccaggatgaaaacgacaatgtgcctttttattattatttatttggtggtcctgtgttatttaagagatcaaatgtataaccacctagctcttttcacctgacttagtaataactcatactaactggtttggatgcctgggttgtgacttctactgaccgctagataaacgtgtgcctgtcccccaggtggtgggaataatttacaatctgtccaaccagaaaagaatgtgtgtgtttgagcagcattgacacatatctactttgataagagacttcctgattctctaggtcggttcgtggttatcccattgtggaaattcatcttgaatcccattgtcctatagtcctagcaataagagaaatttcctcaagtttccatgtgcggttctcctagctgcagcaatactttgacattt

SEQ ID NO: 363 - DNA, 328 bp, Homo sapiens
aaactggttatgacaaaagcctttagttgtgtttcttgaactataaagaaaacaaattttggcagtctttaagtatatatagcttaaaatataatttttagcatttggcaccatatgtatgccattatatttgattttgcattactgtttcacaatgaagctttctttaaggctttgatttttatgattatgaaagaaataaggcacaaccacagtttttctttcttaaatttcatcactgttgatgtggttcttttgtgttaaaaaaaaaaagtgcaactatcaaaactaaaaaattatagagtaatattgccgttctgctgatttt

SEQ ID NO: 364 - DNA, 569 bp, Homo sapiens
cctgggcacctctttgcttgaaatatggcaagacttggaaaaatgtttgcccttagaatctatctcactactttagttagttgtctcctttgggcctgggcacagttctggccctgatctggaacagactcccttttctaaaactgaacttgaccacatcaaaagtttgtaaaacaatctccatggtaattaaacttgcattcaacaccatatggtaacagaagatggcaaaggataagattcagatcttagatctttccaagtagggcatgttagatgatagaaggattagttgcaagctggatctgagctcaggcttgggcatgaaggaaactgtctcccatgtggtttggaagagttaggggctccctgagctctattgtgaactatacgggtttcatccaaggaatggtatgatgtgggcataaaaccattcttcagacaactgaagatggtccccttctgtagccagaaacactagctgtcctgcattgtccatttcctttagccccaggcggtcctgtgtgtacagggaggtctcctgtaagggaatggtttccttggcttgg

SEQ ID NO: 365 - DNA, 151 bp, Homo sapiens
aaaaaaaaaaatccttttattatggaatttgtcaaacacacacacaagcataacaaacccctaggtacccatctccaagttttgacccctattataatttcatcttcagtgttttattatccacttcctctctctctatctttagtatttt

SEQ ID NO: 366 - DNA, 508 bp, Homo sapiens
  misc_feature 43, 99, 132, 136, 138, 142, 180, 204, 208, 228, 233, 249,293, 307, 309, 347, 358, 374, 401, 434, 436, 440, 442, 463: n = A,T,C or G
agtataaagatatattccataaaagagtttggcagtcaaaganaagcatcgcacttccgaaaaacacaagcattcttctcctagtctacagagaattgngtaaaaaaaaaaaaaaatcatcatcaacagccnccantntacnccacactagaatgtacactccggcaagtaaattaaggntgcagtccatccctgaacgatganaagnggtctgagctatggcaaagngttanaaagtagcccagctanacaaatgccccagctatccccaggggagttattcagtacttaanacttcatttccaanancagccccggaaaagccctgacaggaaggggggaccagngatcaccgatntcccattaggggcggncaccaaaaacaaaatgcctggagcttntgagcagctgcagcctggggttgtggctaggcncngggngnggttgcaaaaaaacggctgtntccggggagaggcaaatggcaggccagccagccctgggtacatgg

SEQ ID NO: 367 - DNA, 382 bp, Homo sapiens
cctgagcggctagtctttaagatgcgcttctatcgtttgctgcaaatccgagcagaagccctcctggcggcaggcagccatgtgatcattctgggtgacctgaatacagcccaccgccccattgaccactgggatgcagtcaacctggaatgctttgaagaggacccagggcgcaagtggatggacagcttgctcagtaacttggggtgccagtctgcctctcatgtagggcccttcatcgatagctaccgctgcttccaaccaaagcaggagggggccttcacctgctggtcagcagtcactggcgcccgccatctcaactatggctcccggcttgactatgtgctgggggacaggaccctggtcatagacacctttcagg

SEQ ID NO: 368 - DNA, 174 bp, Homo sapiens
ccttctccctctttgacaaggatggagatggcactatcaccaccaaggagttggggacagtgatgagatccctgggacagaaccccactgaagcagagctgcaggatatgatcaatgaggtggatgcagatgggaacgggaccattgacttcccggagttcctgaccatgatgg

SEQ ID NO: 369 - DNA, 216 bp, Homo sapiens
aaatctcatgggttctattaaaaaaatatatatatagggccccaatccattgccatcaaattgcccttggacttttccaaggtatattatggggttttatgcaaaattccaagctaccatgtaactttttttaaccatttaacaaggagggggaactgtttcctaccttctttacatgttgtgcattgttgtggtccagaaatgccaaaccttttt

SEQ ID NO: 370 - DNA, 344 bp, Homo sapiens
ccttggtcaggatgaagttggctgacacagcttagcttggttttgcttattcaaaagagaaaataactacacatggaaatgaaactagctgaagccttttcttgttttagcaactgaaaattgtacttggtcacttttgtgcttgaggaggcccattttctgcctggcagggggcaggtctgtgccctcccgctgactcctgctgtgtcctgaggtgcatttcctgttgtacacacaagggccaggctccattctccctccctttccaccagtgccacagcctcgtctggaaaaaggaccaggggtcccggaggaacccatttgtgctctgcttggacagcagg

SEQ ID NO: 371 - DNA, 741 bp, Homo sapiens
  misc_feature 644, 646, 689: n = A,T,C or G
aaattacatatctaattgtgtgatttgttaaatgcccatttcttcatctaagtgctaagtgctaagtgtagcagtttgttccctgctacactccaaggcacaaaggagttcaaggaatgtgcaatggaaatcagttagatgaatgtgttaggaaccttccctttaataaagctggatcccacactagcccctacaccctctcatcaccaaatattcctgcttcctctcacctgcacttgctgttctctcctctgccacacaaatctacctctcaagcctaggtcccacctgcttcatgacaactttccagactattccagaacctttaaccatctctgacctctcatcagatctatgttgtacataacaccaattaatgagatcattactgctttatgctctaattgcttcctgtattcaaaatcttctctccaaccacataatgactccctaaacttctcttgtattttccaatgccttgtacaagcacagaactggtcaatcaataaatactcactggttatttgaggaaaaaatgttgccaagcaccatctttatcagaaaataaatcaattcttctaaacttggagaaatcaccctattcctagtatgtgatcttaattagaacaattcagattgagaangngacagcatgctggcagtcctcagagccctcgcttgctctcggnacctccctgcctgggctcccactttggtggcatttgaggagcccttcagcct

SEQ ID NO: 372 - DNA, 218 bp, Homo sapiens
  misc_feature 57, 218: n = A,T,C or G
ccgccagtgtgctggaattcgcccttggccgcccgggcaggtaccacaacagcaggnctgagtgagaaatctaccaccttctacagtagccccagatcaccggacacaacactctcacctgccagcacgacaagctcaggcgtcagtgaagaatccaccacctcccacagccgaccaggctcaacgcacacaacagcattccctggcagtaccttggn

SEQ ID NO: 373 - DNA, 168 bp, Homo sapiens
actgctagggaatgctgttgtgtgcattgagcctggtcggctgtgggaggtggtggattcttcactgacgcctgagcttgtcgtgctggcaggtgagagtgttgtgtccggtgatctggggctactgtagaaggtggtagatttctcactcaggcctgctgttgtggt

SEQ ID NO: 374 - DNA, 154 bp, Homo sapiens
  misc_feature 25, 34: n = A,T,C or G
tgagaaatctaccaccttctacagngagccccanatcaccggacacaacactctcacctgccagcacgacaagctcaggcgtcagtgaagaatccaccacctcccacagccgaccaggctcaacgcacacaacagcattccctggcagtacctc

SEQ ID NO: 375 - DNA, 275 bp, Homo sapiens
actgccaggggacagtgctgtgtcagttgaacctgggctgctgtgggaagttgttgattcctgactggggcctgaggtggtggtgctggcaggtaacagtgttgtatccgttgagcctgggctgctgtgggaagttgtagaatgccgactgaggcctggcgtggtggtgctgtcagggaatgctgttgtgtgcgttgagcctggtcggctgtgggaggtggtggattcttcactgacgcctgagcttgtcgtgctggcaggtgagagtgttgtgg

SEQ ID NO: 376 - DNA, 191 bp, Homo sapiens
  misc_feature 173: n = A,T,C or G
actgccaggggacagtgctgtgtcagttgaacctgagctgctgtgggaagttgttgattcctgactggagcctgaggtggtggtgctggcaggtaacagtgttgtatccgttgagcctgggctgctgtgggaagttgtagaatgccgactgaggcctgccgtggtggtgctgntagggaatgctgctagcg

SEQ ID NO: 377 - DNA, 476 bp, Homo sapiens
ccgccagtgtgctggaattcgcccttggccgcccgggcaggtacatttccttgtagactctgttaatttcctgcagctcctggttggttctggagcagatgatctcaatgagagagtcctcgtcggttcccagccccttcatggaagcttttagctcagaagcgtcatactgagcaggtgtcttcaataggcccaaaatcaccgtctccaggtggccagataaggctgacttcagtgctgatgcaagttcctttttggtccttctctggtaggcgaaggcaatatcctgtctctgtgcattgctgcggttggtcaaaatgttgacaatggtgacctcatccacacctttggtcttgatggctgtttcaatgttcaaagcatcccgctcagcatcaaagttagtataggctttgacagacccatatgcacttgggggtgtagagtgatcaccctccaagccgagcttgcacaggatt

SEQ ID NO: 378 - DNA, 455 bp, Homo sapiens
  misc_feature 370: n = A,T,C or G
agtgtgctggaattcgcccttggccgcccgggcaggtacacatcccatcttcaaatttaaaatcatattgtcagttgtccaaagcagcttgaatttaaagtttgtgctataaaattgtgcaaatatgttaaggattgagacccaccaatgcactactgtaatatttcgcttcctaaatttcttccacctacagataatagacaacaagtctgagaaactaaggctaaccaaacttagatataaatcctaccaataaaatttttcagttttaagttttacagtttgatttaaaaacaaaacagaaacaaatttcaaaataaatcacatcttctcttaaaacttggcaaacccttccctaactgtccaagtntgagcatacactgccactggctttagatactccaattaaatgcactactctttcactggtctgaatgaagtatggtgaaacaagc

SEQ ID NO: 379 - DNA, 297 bp, Homo sapiens
  misc_feature 16, 289: n = A,T,C or G
agctcggatccctagnacggccgccagtgtgctggaattcgcccttagcggcggcccgggcaggtacaaagaatccttagacgccatactgagttttaagttccttaattcctaatttaaggcttctagtgaagcctcctcacagtaggcttcactaggcccacagtgcccctagacctctgacaatcccaccctagacagactttattgcaaaatgcgcctgaagaggcagatgattcccaagagaactcaccaaatcaagacaaatgtcctagatctctagtgtggnagaactat

SEQ ID NO: 380 - DNA, 144 bp, Homo sapiens
  misc_feature 72: n = A,T,C or G
actttgctgaaaattctttttcccagggtctataaaacattaatttgtttttatattttactatttttttgngtttttttgtttttaaatcaataagtaatctaggactagcattatgtttgctagacctggcatttgctcggc

SEQ ID NO: 381 - DNA, 424 bp, Homo sapiens
actcttgaatacaagtttctgataccactgcactgtctgagaatttccaaaactttaatgaactaactgacagcttcatgaaactgtccaccaagatcaagcagagaaaataattaatttcatgggactaaatgaactaatgaggataatattttcataattttttatttgaaattttgctgattctttaaatgtcttgtttcccagatttcaggaaactttttttcttttaagctatccacagcttacagcaatttgataaaatatacttttgtgaacaaaaattgagacatttacattttctccctatgtggtcgctccagacttgggaaactattcatgaatatttatattgtatggtaatatagttattgcacaagttcaataaaaatctgctctttgtataacagaatacatttgaaaa

SEQ ID NO: 382 - DNA, 408 bp, Homo sapiens
actcttgaatacaagtttctgataccactgcactgtctgagaatttccaaaactttaatgaactaactgacagcttcatgaaactgtccaccaagatcaagcagagaaaataattaatttcatgggactaaatgaactaatgaggataatattttcataattttttatttgaaattttgctgattctttaaatgtcttgtttcccagatttcaggaaactttttttcttttaagctatccacagcttacagcaatttgataaaatatacttttgtgaacaaaaattgagacatttacattttctccctatgtggtcgctccagacttgggaaactattcatgaatatttatattgtatggtaatatagttattgcacaagttcaataaaaatctgctctttgtatgac

SEQ ID NO: 383 - DNA, 455 bp, Homo sapiens
  misc_feature 70, 72, 73, 184, 185, 330: n = A,T,C or G
actcttgaatacaagtttctgataccactgcactgtctgagaatttccaaaactttaatgaactaactgncnncttcatgaaactgtccaccaagatcaagcagagaaaataattaatttcatgggactaaatgaactaatgaggataatattttcataattttttatttgaaattttgctgannctttaaatgtcttgtttcccagatttcaggaaactttttttcttttaagctatccacagcttatagcaatttgataaaatatacttttgtgaacaaaaattgagacatttacattttctccctatgtggtcgctccagacttggnaaactattcatgaatatttatattgtatggtaatatagttattgcacaagttcaataaaaatctgctctttgtataacagaatacatttgaaaacattggttatattaccaagactttgactaga

SEQ ID NO: 384 - DNA, 376 bp, Homo sapiens
  misc_feature 276, 357: n = A,T,C or G
actcttgaatacaaggttctgatatcactgcactgtctgagaatttccaaaactttaatgaactaactgacagcttcatgaaactgtccaccaagatcaagcagagaaaataattaatttcatgggactaaatgaactaatgaggataatattttcataattttttatttgaaattttgctgattctttaaatgtcttgtttcccagatttcaggaaacttttttttcttttaagctatccacagcttacagcaatttgataaaatatacttttgngaacaaaaattgagacatttacattttctccctatgtgggcgctccagacttgggaaactattcatgaatatttatattgnatgggaatatagcattgcc

SEQ ID NO: 385 - DNA, 422 bp, Homo sapiens
acctgtgggtttattacctatgggtttatatcctcaaatacgacattctagtcaaagtcttggtaatataaccaatgttttcaaatgtattctgtcatacaaagagcagatttttattgaacttgtgcaataactatattaccatacaatataaatattcatgaatagtttcccaagtctggagcgaccacatagggagaaaatgtaaatgtctcaatttttgttcacaaaagtatattttatcaaattgctgtaagctgtggatagcttaaaagaaaaaaagtttcctgaaatctgggaaacaagacatttaaagaatcagcaaaatttcaaataaaaaattatgaaaatattatcctcattagttcatttagtcccatgaaattaattattttctctgcttgatcttggtggacagtttc

SEQ ID NO: 386 - DNA, 313 bp, Homo sapiens
caagtaggtctacaagacgctacttcccctatcatagaagagcttatcacctttcatgatcacgccctcataatcattttccttatctgcttcctagtcctgtatgcccttttcctaacactcacaacaaaactaactaatactaacatctcagacgctcaggaaatagaaaccgtctgaactatcctgcccgccatcatcctagtcctcatcgccctcccatccctacgcatcctttacataacagacgaggtcaacgatccctcccttaccatcaaatcaattggccaccaatggtactgaacctacgagt

SEQ ID NO: 387 - DNA, 236 bp, Homo sapiens
cgccctcataatcattttccttatctgcttcctagtcctgtatgcccttttcctaacactcacaacaaaactaactaatactaacatctcagacgctcaggaaatagaaaccgtctgaactatcctgcccgccatcatcctagtcctcatcgccctcccatccctacgcatcctttacataacagacgaggtcaacgatccctcccttaccatcaaatcaattggccaccaatggt

SEQ ID NO: 388 - DNA, 195 bp, Homo sapiens
acgcccttttcctaacactcacaacaaaactaactaatactaacatctcagacgctcaggaaatagaaaccgtctgaactatcctgcccgccatcatcctagtcctcatcgccctcccatccctacgcatcctttacataacagacgaggtcaacgatccctcccttaccatcaaatcaattggccaccaatggt

SEQ ID NO: 389 - DNA, 183 bp, Homo sapiens
  misc_feature 31, 32, 60, 115: n = A,T,C or G
taacactcacaacaaaactaactaatactannatctcagacgctcaggaaatagaaaccncctgaactatcctgcccgccatcatcctagtcctcatcgccctcccatccctacncatcctttacataacagacgaggtcaacgatccctcccttaccatcaaatcaattggccaccaatggt

SEQ ID NO: 390 - DNA, 473 bp, Homo sapiens
acaaagcagcaactgcaatactcaaggttaaaacattagaaaagcatttgtgtgacaggtatattacagtattatcaaaatattacattttcagacttacttagcagataatcatccaccagagcttaaatctttaaattatttccatagtcttaaaaaatatgtaatgtcagaatgcatataaaaagaatgtaaaaggaaacctaaaatacaaatggaataatgtaacaaataaatatttgatttcagtaactgttaataatcagctcaacaccaccattctctctaaactcaatttaattcttataggaataatgaactgtcaaatgccatggcataattatttatttccaagctatcatcaatgattagaactaaaaaaaatttggcataaaaaaatcacaattcagcataaataaagctatttttagcttcaacactagctagcatctctaagaattgttgaaataagt

SEQ ID NO: 391 - DNA, 216 bp, Homo sapiens
  misc_feature 41, 42: n = A,T,C or G
atttgtattttaggtttccttttacattctttttatatgcnntctgacattacatattttttaagactatggaaataatttaaagatttaagctctggtggatgattatctgctaagtaagtctgaaaatgtaatattttgataatactgtaatatacctgtcacacaaatgcttttctaatgttttaaccttgagtattgcagttgctgctttgt

SEQ ID NO: 392 - DNA, 98 bp, Homo sapiens
acttatttcaacaattcttagagatgctagctagtgttgaagctaaaaatagctttatttatgctgaattgtgatttttttatgccaaatttttttaa

SEQ ID NO: 393 - DNA, 397 bp, Homo sapiens
tgccgatatactctagatgaagttttacattgttgagctattgctgttctcttgggaactgaactcactttcctcctgaggctttggatttgacattgcatttgaccttttatgtagtaattgacatgtgccagggcaatgatgaatgagaatctacccccagatccaagcatcctgagcaactcttgattatccatattgagtcaaatggtaggcatttcctatcacctgtttccattcaacaagagcactacattcatttagctaaacggattccaaagagtagaattgcattgaccgcgactaatttcaaaatgctttttattattattattttttagacagtctcactttgtcgcccaggccggagtgcagtggtgcgatctcagatcagtgt

SEQ ID NO: 394 - DNA, 373 bp, Homo sapiens
  misc_feature 283: n = A,T,C or G
ttacattgttgagctattgctgttctcttgggaactgaactcactttcctcctgaggctttggatttgacattgcatttgaccttttatgtagtaattgacatgtgccagggcaatgatgaatgagaatctacccccagatccaagcatcctgagcaactcttgattatccatattgagtcaaatggtaggcatttcctatcacctgtttccattcaacaagagcactacattcatttagctaaacggattccaaagagtagaattgcattgaccacgactantttcaaaatgctttttattattattattttttagacagtctcactttgtcgcccaggccggagtgcagtggtgcgatctcagatcagtgt

SEQ ID NO: 395 - DNA, 411 bp, Homo sapiens
  misc_feature 327: n = A,T,C or G
actgatcattctatttccccctctattgatccccacctccaaatatctcatcaacaaccgactaatcaccacccaacaatgactaatcaaactaacctcaaaacaaatgataaccatacacaacactaaaggacgaacctgatctcttatactagtatccttaatcatttttattgccacaactaacctcctcggactcctgcctcactcatttacaccaaccacccaattatctataaacctagccatggccatccccttatgagcgggcgcagtgattataggctttcgctctaagattaaaaatgccctagcccacttcttacngcaaggcacacctacaccccttatccccatactagttattatcgaaaccatcagcctactcattcaaccaatagccctggccgt

SEQ ID NO: 396 - DNA, 411 bp, Homo sapiens
actgatcattctatttccccctctattgatccccacctccaaatatctcatcaacaaccgactaattaccacccaacaatgactaatcaaactaacctcaaaacaaatgatagccatacacaacactaaaggacgaacctgatctcttatactagtatccttaatcatttttattgccacaactaacctcctcggactcctgcctcactcatttacaccaaccacccaactatctataaacctagccatggccatccccttatgagcgggcgcagtgattataggctttcgctctaagattaaaaatgccctagcccacttcttaccacaaggcacacctacaccccttatccccatactagttattatcgaaaccatcagcctactcattcaaccaatagccctggccgt

SEQ ID NO: 397 - DNA, 351 bp, Homo sapiens
  misc_feature 1, 7, 71, 93, 208, 276, 340, 345: n = A,T,C or G
ngccgangtacaaaaaaaagcacattcctagaaaaaggtattggcaaatagtaaaaatgggaggtcaaaancaaaaaaaaaaaaaacaaaacnaaaaaaagaaaaaaccaacaattcttcaattcagtgtgcaaacattatataaaaatagaaatactaactctacaggcagtatttcctgataaattatttaaatagcatatctacncaatctgagatatctattccaatggcaatgagaaaataatttataaaaataaagcaatggtataccanatgatagaaaaaaacataactttcagaaattgtatttaacatttcaatgctatttccttattgngaatncttctc

SEQ ID NO: 398 - DNA, 363 bp, Homo sapiens
acaaaaaaaagcacattcctagaaaaaggtattggcaaatagtaaaaatgggaggtcaaaagcaaaaaaaaaaaaaacaaaacaaaaaaaagaaaaaaccaacaattcttcaattcagtgtgcaaacattatataaaaatagaaatactaactctacaggcagtatttcctgataaattatttaaatagcatatctacacaatctgagatatctattccaatggcaatgagaaaataatttataaaaataaagcaatggtataccagatgatagaaaaaaacataactttcagaaattgtatttaacatttcaatgctatttccttattgggaatacttctctgcagagtttttatgctatgt

SEQ ID NO: 399 - DNA, 360 bp, Homo sapiens
actgtttcctcgtggttcaggggtgtgcatgaaggctcttaggagagcaaacacctgttcctattctgtatgtccctccctcatttcaaatgagagtaaccaattgagtaaaataaccaaataaccattgccccaccatgaacatggggcttgggaagacagtcctacaatcttcatcatatatttaggtttttaggccagccagctctttttttccaaagctttcttttgaatacccgcccgggcggcccctaagggcgaattctgcagatatccatcacactggcggccgctcgagcatgcatctagagggcccaattcgccctatagtgagtcgtattacaattcactggccgtcgt

SEQ ID NO: 400 - DNA, 87 bp, Homo sapiens
  misc_feature 12, 43, 83, 85: n = A,T,C or G
ctgcacatatcnattacactggcggccgctcgagcatgcatgnagagggcccaattctccctatattgagtggaattacaatncnct

SEQ ID NO: 401 - DNA, 328 bp, Homo sapiens
  misc_feature 206: n = A,T,C or G
acccagggacacaaacactctgcctaggaaaaccagagacctttgttcacttgtttatctgctgaccttccttccactattgtcctatgaccctgccaaatccccctctgcgagaaacacccaagaatgatcaataaaaaataaaataaaattaaattaaaaaaaaaaaaagagaggaacccacaaaaaaaaaaaaaaagaaagtntataaaataaaatattgaagtcctttcccattaaaaaaaaaaaaaagaaaaagcacggactctttcatccagttctgatgtgattatctctggaaggcattttctcctcctcttccctcccc

SEQ ID NO: 402 - DNA, 268 bp, Homo sapiens
  misc_feature 1, 227, 253: n = A,T,C or G
nacataatgacaacatcttcactagactgagtgttcaaggatttgagatgattcgctattcatcacaccccgaagattgagatccactgtatttacacaaagcaaagccatgtcagcaagggactgtcaacctgattctgagaacataaacattcaaaatttattttccagtgttcctttttggaaaccaacaacacatctttaatacctacacacacacacatctntacctttaaaaaaaaaaaaaaagtgnaacttcacagatagt

SEQ ID NO: 403 - DNA, 538 bp, Homo sapiens
acagtgatagctccccctgggcaatacaatacaagaacagtgggttttgtcaaattggaacaaggaaacagaaccacagaaataaatacattggttaacatcagattagttcaggttacttttttgtaaaagttaaagtagaggggacttctgtattatgctaactcaagtagactggaatctcctgtgttctttttttttttaaattggttttaattttttttaattggatctatcttcttccttaacatttcagttggagtatgtagcatttagcaccactggctcaatgcgctcacctaggtgagagtgtgaccaaatcttaaagcattagtgctattatcagttaccaccatttggggcttttatccttcatgggttatgatgttctcctgatgacacatttctctgagttttgtaattccagccaaagagagaccattcactatttgatggctggctgcatgcagacatttaaagcttttagagaatacactacaccagggagtatgactactagtatgactattaggagggt

SEQ ID NO: 404 - DNA, 310 bp, Homo sapiens
tttttttatagatacaattggcttttatttgtgattcatgagtcagggcagtttccattctgcaaaatatagtgatagctcctactgggcaatacaacagtagaacagtgggttttgtaaaatgggaatccaggaacagaagaatataaataaattgatttaaataaactgattggttaatttcagaatacttcatattacttttttctaagagttaaagcagaaaggactttcttactgtgctgactcagacagcctggactctcatgtttttaggaaaattttgtctgttctgggatctacctgcttc

SEQ ID NO: 405 - DNA, 559 bp, Homo sapiens
acaaatcacaattattaactcactggtagggcagtgatgatcaaaccaattgcattcatccatgctgtaatgttctctcttggcactaaaggctgactgcagccggcaaaaaagaatgtaagtatgaatttataaaaacattttagatggctgacaacggatcttatttttaaagaatatgtctaattcagaggatcgacaactaatccatttcaataaaacaatggggaattttttattgaataaaaatgtaatatgcataaaaactcaagaaggctttttaaaaatacttcctccccaatcattatcccatacttcatgctaatttttaaaagaatcttgaaatcttgaaaacaagatgaagagaatcttgttttaagtgacaagttaacattattcctatattaaatgtcaaactgctattaatgagtagaagtaggaacaaacccggatcttaggatcctgtccagggctcattccataactcctatatcacaaagacaagatctggaaccagaaaacagtcatcatccaatgtgcatcagccttgcggcaacag

SEQ ID NO: 406 - DNA, 427 bp, Homo sapiens
acaacagaatatctcgggaatggactcagaagtatgccatgtgatgctaccttaaagtcagaataacctgcattatagctggaataaactttaaattactgttccttttttgattttcttatccggctgctcccctatcagacctcatcttttttaattttattttttgtttacctccctccattcattcacatgctcatctgagaagacttaagttcttccagctttggacaataactgcttttagaaactgtaaagtagttacaagagaacagttgcccaagactcagaatttttaaaaaaaaaaatggagcatgtgtattatgtggccaatgtcttcactctaacttggttatgagactaaaaccattcctcactgctctaacatgctgaagaaatcatctgagggggagggagatggatgctc

SEQ ID NO: 407 - DNA, 419 bp, Homo sapiens
acaatttgtagttgtttccaggtttggctaataatcattccttaacctagaattcagatgatcctggaattaaggcaggtcagaggactgtaatgatagaattaaattagtgtcactaaaaactgtcccaaagtgctgcttcctaataggaattcattaacctaaaacaagatgttactattatatcgatagactatgaatgctatttctagaaaaagtctagtgccaaatttgtcttattaaataaaaacaatgtaggagcagcttttcttctagtttgatgtcatttaagaattactaacacagtggcagtgttaaatgaagatgctgtctacaaggtagataatatactgtttgatactcaaaacatttttcattttgtttaaagtagaagttacataattctatattttaagtct

SEQ ID NO: 408 - DNA, 523 bp, Homo sapiens
  misc_feature 520: n = A,T,C or G
acatttgatgttatgtgaatgttgagtttttttcttctaattttcacttcagcagtgtttagggctttcagatgccttattccagtgtgaacagaaaaagttcatattttatgtggttaatgctttgatgtgtcacataaagagtagtttgtagaaaatgttggcacaattttaacttcttagtggcttgtgacattatatattatatatatatgtatatatatctttataacattcctgtgtttagtagtgtaaatgttctgggcaagttttaatattttgaatgcctttggatattccagcaataaaggcatcatgttctgcaataggatttcttactcatttacctattttaacactaaaatagaccacaactgagcacaaattccttttataaatgttatagaagcagggaagaataataaacacatttgtgaattgtggttcagtttatttatctttagggaaggctgatcatttatcttatagcacataaccccagcctcttattcattatggntaa

SEQ ID NO: 409 - DNA, 191 bp, Homo sapiens
  misc_feature 156, 190: n = A,T,C or G
accccgtagtgatgagcactgactggttcactggccacattttagttcttcataataataggccacaaaagggctctgtggtttgcctccatgtgcactggcccctccccacccctagggggcactcagtagctgctgagaaggcctgtccacgangctgttggaaccccttcaataaatacttagaagna

SEQ ID NO: 410 - DNA, 403 bp, Homo sapiens
  misc_feature 399: n = A,T,C or G
acactggccagtgtgtttttggcgattaaacataatcctgtgaatcagattaattcacttgctgagtgttcatttgcggcatccctctgttgggtcttgggggccctccacgacctcgtggggctccccgtggtccactctgcccagagcctcgcttgaaattctgctgatatccatcccgttgatagccagagtaatcccggggagcactgaactgagactgtgtataaccactgtttggagtgttagagaatgaagggcggtaaccatcatatcctcctctgaatccattggcagggccccggtatccattcatcaagcctctagcaccacgggagcctccacgagacacaccacgactattgtaatagggctgattgctacgtggaaatccagtgntctg

SEQ ID NO: 411 - DNA, 384 bp, Homo sapiens
acgtgaaatcataacaacatgttctcttgtgtttggcttctcttgctcagcatgatatttttacggttcacccatattgcatgtatcaggaatataatcctttttattattgagtagtgttctattgtatgtatataccacagtttatttctcccttcatcctttgctagattttggggttttttcacattgcgctattcaagtataaacctgctctcaacattcatgtgcaagtctttgagtggacatatatttgccgtttctcttgagtgaatgcaccttgttgggtcacgtggcttaatttaaaaaaattttaatcactgtggtgcatatgtagtgattattagtgattatctcataattttattttcttgatgactaatg

SEQ ID NO: 412 - DNA, 315 bp, Homo sapiens
  misc_feature 71, 314: n = A,T,C or G
acaatatttctcctttgagaagataggatatatgattttcccaaaaatcacaactttgaaggaagacttanttgctgacttcaattatatcctggaactggcaacttgtgcccttcctttgcttcaaaaaaagtgtaagaaagagtgataagatcaactttaatcattcttggatcttcagcaaattcaggatcaatgtagaaaaacactggcatatctacttcctcttggggattaagcctttgttcttcaaaacagaagcactgtattttattgaaatactgtccaccttcaaatggaacaatattgtatgna

SEQ ID NO: 413 - DNA, 554 bp, Homo sapiens
  misc_feature 479, 542, 551: n = A,T,C or G
acaggtttcactattacaaatatatgatgttaaactaacaaactcatgaccttcaaagatgtcttcgtcccacgcacacacatttgtaatttgtgtccatttgctatttcccttcttctataatcttcaaattatatagttatgcattgagttccctatgcatctcacccatctcctttatctcagccttctcatactttgccattctcttctttctggaaataaccagcacaacaattccagcaacaactgctatcaccacaaccacaataacagcaataacaccagcttttagaccctgcattgagaattcaggtgctttttcatcaacataataaattaaagtttgaccaggatccagatccagttgttccccatttactgtcaggtgccattttcttagaatgaaacaaggattcacctttaacatctttttcaaaataataagccacatcagctatgtccacatcattctgagntttttgagaagaattttgaaccagatcaatagtgataacattattctcatacaaaatactcgngataaattntgg

SEQ ID NO: 414 - DNA, 267 bp, Homo sapiens
accagaaaggcacacgattttacaatatttgttggaattaccttactttttaacctcctcatagcagttttggtttgagtatattgatgaaagccaaagtctggtatctaaaacttgggccaatgtttcccaactggtatatgtcaggctttcccaatagcttaactgtgaccctatacggatggctttttagatagttctatactgctgtattgtgttagcacttttctttgtcattaacaacacactttaaatgacatttggtga

SEQ ID NO: 415 - DNA, 454 bp, Homo sapiens
accggaacctgcagaaacagtgtgagaaattaagtcctggttcactgcgcagtagcaaagatggtcaaggccatggaaaaagcagaaatttaccaagaaagctgatacccatgtatagttcccactcatctcaaatacatctgctatctttttaagctaagtcctagacatatcggggataacatgggggttgattagtgaccacagttatcagaagcagagaaatgtaattccatattttatttgaaacttattccatattttaattggatattgagtgattgggttatcaaacacccacaaactttaattttgttaaatttatatggctttgaaatagaagtataagttgctaccattttttgataacattgaaagatagtattttaccatctttaatcatcttggaaaatacaagtcctgtgaacaaccactctttcacctagcagtatga

SEQ ID NO: 416 - DNA, 370 bp, Homo sapiens
ccgacacggtgccagcgccctgctgcgtgcccgccagctacaatcccatggtgctcattcaaaagaccgataccggggtgtcgctccagacctatgatgacttgttagccaaagactgccactgcatatgagcagtcctggtccttccactgtgcacctgcgcggaggacgcgacctcagttgtcctgccctgtggaatgggctcaaggttcctgagacacccgattcctgcccaaacagctgtatttatataagtctgttatttattattaatttattggggtgaccttcttggggactcgggggctggtctgatggaactgtgtatttatttaaaactctggtgataaaaataaagctgtctgaactg

SEQ ID NO: 417 - DNA, 463 bp, Homo sapiens
acactttatatattccaaattgatcagatatatggtttgcaaattcatctcaatctgtagcttatcttttcctcttcttaaatcacaagtttttaaattttgaagaagtccaatatatcagattttgtcttttatggatgtgctttcggggcaaagtccaagaacttgtcacctagcccaagatcctgaagatttttctcctgtggcttttttcaaagttatctagttttatgtatcacatttaagtccgttatacattttgagttaaattttatataagatgtgaggtttaagtagaggttcttttttctcctcgccatgggtgtctaattgctctagcataatttgtcagaaaggctattcttcctccattgaattgctttttcactttttcaaaatcagctgagcatatttatatgggtttatttctgggttctctcatctgttccattgacgtatgtgt

SEQ ID NO: 418 - DNA, 334 bp, Homo sapiens
ttagcatttgcttttatttttttactttgatgccttttcaaattggcatgtctttaaagtatttttcttcctgattaaaaatgtgtgtgtatgtgtgtgtgtgtgtgtatatatatatttttttaaatcacattaattttaccaagtgaaaccaagccatactgtttttgagccaattaagaaaattgccatttttaaagtgtagcatttcagggtaaagacccatgaaatggcttgatgtattctagactactgaaagaaaaccacttcaaagattttgttgaaagttttagtgttgtctgaaatgcaagagggaaggtgattggtagtgagt

SEQ ID NO: 419 - DNA, 297 bp, Homo sapiens
acttctttgaccaaggaataccacagacaccctaccgatagaacagtggctcagatcttacttgctcctgcttacgaagtattcccaatcactggtcatctgaccctacttgaacactcctgaacagtcatgttttttaaaatcttcctttatatcaagtcagagagtatacttctataaatttcactcatggatgttaggaaatctagtcatcttccctgtgattgccctgttaagtatttaaccatagctatcatgtgtttcccaaatcttctctagattaaatatcttcagtta

SEQ ID NO: 420 - DNA, 418 bp, Homo sapiens
acgagaggaaccgcaggttcagacatttggtgtatgtcctatcaataggagctgtatttgccatcataggaggcttcattcactgatttcccctattctcaggctacaccctagaccaaacctacgccaaaatccatttcgctatcatattcatcggcgtaaatctaactttcttcccacaacactttctcggcctatccggaatgccccgacgttactcggactaccccgatacatacaccacatgaaatatcctatcatctgtaggctcattcatttctctaacagcagtaatattaataattttcatgatttgagaagccttcgcttcgaagcgaaaagtcctaatagtagaagaaccctccataaacctggagtgactatatggatgccccccaccctaccacacattcgaaga

SEQ ID NO: 421 - DNA, 304 bp, Homo sapiens
acgcctggacccctgtgacttgcagcctatctttgatgacatgctccactttctaaatcctgaggagctgcgggtgattgaagagattccccaggctgaggacaaactagaccggctattcgaaattattggagtcaagagccaggaagccagccagaccctcctggactctgtttatagccatcttcctgacctgctgtagaacatagggatactgcattctggaaattactcaatttagtggcagggtggttttttaattttcttctgtttctgatttttgttgtttggggtgtgtgtgtgt

SEQ ID NO: 422 - DNA, 578 bp, Homo sapiens
actgtgcaggcagattcacagggtggtggtaaagcatccacaatggctctggcagcatcaggatcacacttgaaggggctctcagacaaagttgtattcatgcaactgattccttttccattcgttttcttagtcactaatgctttccaatggtcatgagtgcttttaataatatcaatggcaaagtccttatctttaaattctgcattaaacgcaaactcattttctggttttccatcaggaaccttataccttctaaaccagtccacagtagcttctaagtagccaggtttcagccgtttgacatcattgatatcattataattggctgcatcaggatcatccacattaatggcaatgactttccagtcggtttccccttcgtcaatcatagccaatatgcctagaactttcaattatttatttcacctcttgcacataccttgcttccaatttcacacacatcaattgggtcattgtcaccacaacagccagtatgtttatcattgtgccctgggtcttcccaagtctgagggatggcaccatagttccagatatatcctttatacgggaacaaa

SEQ ID NO: 423 - DNA, 327 bp, Homo sapiens
  misc_feature 309, 312: n = A,T,C or G
acagtatatttttagaaactcatttttctactaaaacaaacacagtttactttagagagactgcaatagaatcaaaatttgaaactgaaatctttgtttaaaagggttaagttgaggcaagaggaaagccctttctctctcttataaaaaggcacaacctcattggggagctaagctaggtcattgtcatggtgaagaagagaagcatcgtttttatatttaggaaattttaaaagatgatggaaagcacatttagcttggtctgaggcaggttctgttggggcagtgttaatggaaagggctcactgntgntactactagaaaaat

SEQ ID NO: 424 - DNA, 384 bp, Homo sapiens
acgaaaaataaatctccttaaaaactaaataaaatgcactgtattcttacagttaatgtttataactatagtaaaaaattaatatatatcctattacataaatgttatttcttaggtgttccattaagaagagcaatagaataatgctaaaaaataatgcctataaatcttcagagtataaagacatccattcagaaacaaaaattagcactaaattttttataaaatagaccagatgacaaaatttattttatttttaaacagtggttttgacacaaattatgttattgaaaagcattattaatgtttaatttatttaaaattttggaatttgccatttctcagagaatgatcaggccttaggaaattaatacagtagtagta

SEQ ID NO: 425 - DNA, 255 bp, Homo sapiens
actatcaggctttgtgctgatttcctgaacaaactgcattatattatgaaaacaaaaggaaaagaagaaataataaaaactatactcccatatttcacttacagtgtttgagttcctggaaggacctatataatggaggcagcattcaaacaagaaattatgccaatcaactgtcaaattttcactataattttcctaaaaaggcgtttttcccccaatatctattaatctcaaagaaacataagttgtgaatgt

SEQ ID NO: 426 - DNA, 196 bp, Homo sapiens
  misc_feature 8, 10, 11: n = A,T,C or G
acatgaantnnccaggcccacacagccagacagcaacagaaccaagacctagggctcttcactcctgttacatcacaccatggcaatgattttacattctccaactgattcaaatcatatggcagctagggatttgggggctccatgttttatttcaattgcaagttcaagatttctttttatctttgtgggctga

SEQ ID NO: 427 - DNA, 163 bp, Homo sapiens
acagaagatccatggaggcaagtgctgtcaggaaggacactgcctccctccaccctcccaaatgtcaccaccaagttccttcaggtgagacctcacacaatgtcaagtgctttctaggaaatactaagatcaggttgagagattctgcttggtctagtcaatc

SEQ ID NO: 428 - DNA, 315 bp, Homo sapiens
  misc_feature 1, 10: n = A,T,C or G
nactgagtanagatgctggggaatgtgcaatatgccttgaagaattgcagcagggagatactatagcacgactgccttgtctatgcatatatcataaaggctgcatagatgaatggtttgaagtaaatagatcttgccctgagcacccttcagattaagcgtcagcttcctgttttataggttttcttgtcttgacaagatgcttgaaaaaccaagaggatatgaaaatctgtctctggagaaacaaagacgcaggcatactcagccagaaatctgagttttgtgagacttggtaatacagagatggacaatcgt

SEQ ID NO: 429 - DNA, 131 bp, Homo sapiens
  misc_feature 10, 42: n = A,T,C or G
acagttaggnactagaacatttgttaagcctcccaaagtagngtgcatggaagattctagagtgtccagctcttgcactacaaatgtaataataacagaataaatacacttaccctgatgatattgagggt

SEQ ID NO: 430 - DNA, 503 bp, Homo sapiens
actgatttttaataaaagaaataaggttcaaagtttagcacaacaacacagcaataagaagctgacaacttggataaaaatacaagaaagtaacacagagcccaggctacccattatttactgtgtgcatacaggaatgctatacttcagatgtataaattagagactgattttaagttattaatttaactactttttgtccactgtgctaaactaaattttatactaatgtgctactgcgtaaacacttcaaagcaatcttcattaaaatgctgcaaagaaaaacaagaatacacatcatccaaaactaaggatgtcattgcagttcacagtttgtataataaataccctccctttcaatcactactaagatcactacatcctatctactcatcagcacaaccttgaagcaacttatacttacaaatattagcaatgcagccaaacatttgttttttgcaaagcaactagtaaaaatcaagaattttaattaagacggtgca

SEQ ID NO: 431 - DNA, 207 bp, Homo sapiens
acaagtgtggcctcatcaagccctgcccagccaactactttgcgtttaaaatctgcagtggggccgccaacgtcgtgggccctactatgtgctttgaagaccgcatgatcatgagtcctgtgaaaaacaatgtgggcagaggcctaaacatcgccctggtgaatggaaccacgggagctgtgctgggacagaaggcatttgacatgt

SEQ ID NO: 432 - DNA, 485 bp, Homo sapiens
  misc_feature 37, 43, 56, 59, 435, 438, 453: n = A,T,C or G
aaaaaaagtaatggaaaaatggttgcaggtttaatcncaaaangaacttaattttngtngattttgttttatctgctaaaacactaatatctataaatatgaactgacagcatcgttctaaatttacttctgaagagctgtcgagacttcaataaaatataagcaagttactggatcatatttatggactgctgaattaactacccgaaaagtatcagttactttcaaagaacacaaaacaaagtgaacgtggaaaaaagccttctttgcaaaagtccttttattagtcctatcctctaaaattccaagccacagagccttgatattcctggattctgttttaagtaaccttagttttaaatatgacacttgggatatgcacaatgggaaagggtaggatatgtgaacaaaatttaatttcttttttccaaaggnagncattttctttaaatncatcctatccacttttgcccacttccccatgt

SEQ ID NO: 433 - DNA, 280 bp, Homo sapiens
actgtcactacaatattacattctgcaaatgttattctgttgtatcagatacaaaattttagtgaggtatctctaaggcacatagtagaaaacaaaattggttaattactcaagttcctttcactgtgatttggaaatgatttaatctttatagaatgagaaccttttttggactagcttttttattaaaatggctcaatttgtgttgataaggattgcattaatatttaatagtgcttgcttttcctctgggcacaccattttgatcattaaccagagt

SEQ ID NO: 434 - DNA, 234 bp, Homo sapiens
ctttgctgcgcatcaggtgctttaagcttcggaacaactgtgcaggattctattttagtattctggaagcatcattgaggaagtagtccagtgaagttagctctaaaaaaactctttactctaacaattaaaagaaatatgccaaaggatccataagggatgaataaattattaaactattaagaagttgctataaatatgcagtgttaattcaataattcataacggactggt

SEQ ID NO: 435 - DNA, 330 bp, Homo sapiens
acctcccgtgtcaccagttcccacagaagcactgcaaaactccacatgtctgctgagcgtctgtttgtgtcttcaggcttcttctgcagagcttcgggggctacccaggcaggtgcatacatgcgaccaggacattggaaagagaacttgacatcagccatgctaattcgggcagtcatgtcctcatcaatcattacactacggctattgagtgcatgtcgtgggatgaggggctctagtgtgtgtaggaaagccatgccccttgccatgtccaaagcaaacttcacagcctggctctggtccacgacgaaattggtgccttcatgtagt

SEQ ID NO: 436 - DNA, 311 bp, Homo sapiens
acaactttacaatggaattgtatttcaatgattattttgatatcagattaaaccttccaaaaagttacacataattcaggtctattttttctaccagtaagagttctgctaaattacaaaaccccataatcacagtgttcagtttttaaaaaattaaacacacagtaatcctgtcaatgttaatcaaaatcaaaacttcggaatgccgtggcatttatgtgaccaatctgagttttagatacaaataccagctgtttatcccatgaaccatttttcctaggctgaggctgtgaaaaatcgaaagtcggcgt

SEQ ID NO: 437 - DNA, 355 bp, Homo sapiens
actagtggatgggggtcagggtgtcactccaaggccctctacagacccagagaagaggaaagtcaaaaaagccagatatgagactgctgaagtggtgttaagaaatataggcaaggtaaagggaacaagatctgggctccctcctacttgtgtccctcactggacctcagacaccctacctctaagactggttcttagaaggctgaacagtaaggagcattccaatagcttctgaaactcccaaggctgtttcaagtagtcgaaagccatccctggactgttcaggtgccttttctatttcccacctgagctctctgccctttctttgagcctcacaggtttccagaattacagt

SEQ ID NO: 438 - DNA, 431 bp, Homo sapiens
acagtaactttaactttacatagagctgagataaaaataaagctttcttacaaattacattttttttccagtgaattacttttgcagtaaaaatagctgctacataaatccctcctgatctctgaaaaggagttgcatatttccaaaaataatattcttattttaatcacacagaagaacgtggagcacaggaaggaaatggctgggtggtcagagagaggtgagctgtcggagaaacacagttaaactaaaaaataaaatccattttgtgtataaactgacttaaacgcatgcaaagaagtggaaaacatatgccatttgtcaagaaaaatactgctttatagcttttactttacaattaaaggagaaagcagaggccagatataagcccagataataacatttaagtttctcataaaactcccaaatgt

SEQ ID NO: 439 - DNA, 170 bp, Homo sapiens
actgtcataaaaaacagtggagctctgtattagaaagcccctcagaactgggaaggccaggtaactctagttacacagaaactgtgactaaagtctatgaaactgattacaacagactgtaagaatcaaagtcaactgacatctatgctacatattattatatagtttgt

SEQ ID NO: 440 - DNA, 400 bp, Homo sapiens
acgtaaaaagaacatccttcccatcttcaaggtcaagattgaacgctgactcctgcaggaagtcttccaggattcccaggcaggaatgatggctccctgtccctgtagctccaggagttcttgcttcacgcacgcctcacataccagactgaatgttggcaggaggagtgaccaggtcggtcatctgtgtccctaccacctacaacaggccagcaatctacccgtgtgtgtttgttggacagaattaaccatgatgggcggccgagggcgcctggagctatttgggggcttggagagaacctcttaggagagtgtcaggctctaggccagtgtcaccagaggaggtcagtctcagtccttggagtggtgggatggaaaccagacgggactggcatggtcc

SEQ ID NO: 441 - DNA, 204 bp, Homo sapiens
acctagttacttcttaagatcaggtgtataaaactgtggagtggagcggtatggtatggaatgacttggaatgtaagctgtcagggagaaaatgttgttacacttttgctaagatctgggggtttcttcatattcctgctgttggaagcagttgaccagaaatgcttgccagtactgccaaagcactgctgtgaaatgtgaagt

SEQ ID NO: 442 - DNA, 649 bp, Homo sapiens
acatttaattttttacaacattttctccctagagatataatttagatattcctatcttcaaagtaaaaatcaaaataggaaataagcatagaaacagcctattggcagtggttacacctgcatggtatttatgagtctccaaactattggaaatttatttcaaccaaggttctcttaagtcttcattacttgggtgtaactcgagagaaaactaatttatatcaatttacagtttagtggtcatgatcaggggaaagtgatactcttccactgactacaagtcattgcagaggcagtttagaacttttcctttattcctaatatacaggacaaaccttgccgacatctcactacctcaaaaatcaaatttaaatgaagtatccaggagtagcctaaagaatgagtgtaatctggatggattttagtctaaatttatgccttgctcttcagtaaagtatagtaactccagatatatgttccacagatgcaataatttctgttccttgttcggtgcagaatataatttatacttcctgaaatcaactttgtctattcatgaaaatagctgctttttatttgcctttgtctcactttgaatatatatgatccacaggttacagacttttccaataactacatttcaacttgt

SEQ ID NO: 443 - DNA, 346 bp, Homo sapiens
acgtgggattgaaatgcacatacatgtttttgctaagagcacatacatttcattctcctcactttgttcataacctcagcattgtcagataacctcagtgagttaactcaaagccttttattatggaaagaactggcacagttacatttgccagtggcaacatccttaaaaattaataactgatgggtcacggacagatttttgacctagttcctttttcttttagagcaaaaagaacttttacctcggcatccagcccaacccctaaagactgacaatatccttcaagctcctttgaaagcaccctaaacagccatttccattttaatagttggatgcggattgt

SEQ ID NO: 444 - DNA, 425 bp, Homo sapiens
accaatttccttttacagtaaaggggcttttcctgttgcttgttgaaccggttcccagctgcccattaccaccaagcccaaaagagtaaattcgtcctgatgaaggaacaaaagcagaagtgtgctgccgtccacaagcaatctcagtgacaatgcttcccataagttcaaaaactttccttgggtttatttcatgactggtagaattatggcccaactgaccataccctccagctccaaaagtaaacactccaccttccttggttagagcagcagtatgatcttctccacaacaaatataaactattttctgagatcttagtgactttagtaaattaggaacatacctatcattttcatcattaagacctagctgaccaaacttgttgcgtccccatccaaagatagctccagaaagggtgagt

SEQ ID NO: 445 - DNA, 210 bp, Homo sapiens
  misc_feature 1: n = A,T,C or G
nactgtcccaatataaaacagtaattatttgacctttgcactgtttgtctggtccttttcagtttgattgcatataaatgtggaacttgatagatctctatatttttaatgcacttgtgataaactggcagcagggttagacattactttcaaagcttgaggtagaccgagtcagcatgctagacaggcttctctctctaaccaaaactg

SEQ ID NO: 446 - DNA, 326 bp, Homo sapiens
tcgaaagacccctgtaaaagagcccaacagtgaaaatgtagatatcagcagtggaggaggcgtgacaggctggaagagcaaatgctgctgagcattctcctgttccatcagttgccatccactaccccgttttctcttcttgctgcaaaataaaccactctgcccatttttaactctaaacagatatttttgtttctcatcttaactatccaagccacctattttatttgttctttcatctgtgactgcttgctgactttatcataattttcttcaaacaaaaaaatgtatagaaaaatcatgtctgtgagttcatttttaaatgt

SEQ ID NO: 447 - DNA, 304 bp, Homo sapiens
  misc_feature 1, 3, 6, 31, 34, 35, 79: n = A,T,C or G
ncntcnaggtacatgctagaagtctgatgtngtnngtaacacagaaacatacacagtcttcatattcaaagtcttcacngggatgtcgttctgtaatttcctgcgtttgggtctcttccagaaacagctttagcttcctgctccgaaggccaaacaccttggctgcttcatacagaagaccttggtgggtgagtccattctgcccaagtgggttttcaagcaggagagtgcccactgtccccattaaacactcttgtggctttgcattcaggagctgtaggttgatatactgacaaggaagagt

SEQ ID NO: 448 - DNA, 203 bp, Homo sapiens
acatgaaagcggcaatgcggtaaaaagcgaattcttacccaaggtcagaattttttattaagcgcattttcattagttggacaaacaaccttataaacccttatgtcaaaccatataatgtgaagaatctccatgggagagattttttttcacccttcagaattatctttttcccctaagaccttcatatgaatcttccttgt

SEQ ID NO: 449 - DNA, 481 bp, Homo sapiens
  misc_feature 458: n = A,T,C or G
acttgttctataatactctgatgtttccttaaattcctgaacaacattctgtttactaaatttcttttcttcctttattcacaccaaattccaccctataatagaagctaattatttcagaaagctttttagtgatcatttattactttgtgtttactagatattaattctaagatgaattcctttagaattttagaaaaaattattctagacaacaatcaaagtaaaggatacatccagcattgaaaccataagccggcaagtctccaggttaaaaggtttgtatcctccagcaatgccagactgtgtcagacatctctgcaattcatcagcatctatctgcccatcctgtccagctacagcagcaaagtaaccatacagcggatcctgagtttgtccgggaaacgcaggccctccgggagcccctccatactgcatcttgagttgaagtcttatangtagaagctggtgatccttagag

SEQ ID NO: 450 - DNA, 296 bp, Homo sapiens
acatggtttaatacaacaacaaaaaaatttaatcaagtgaaacgtaataaactgaacaataaacactcaaaacattttccattggaaacatgtaaagacaatatgaggttttgttaccatcttactgcaattttcttatgtgttactagtctacataccccatgttttctgtaatcatgcagatgtgaatggaagtttgaatgattaaataaatgaaaagtccgtttactgcagggaatcatttcacaaggcagccaaaccgggtttagagaacaaaactattcaagaaattctcc

SEQ ID NO: 451 - DNA, 294 bp, Homo sapiens
  misc_feature 6, 20, 198: n = A,T,C or G
acatgntccaaggcacgcgnctgtgaacttcctctgagtgaaggcatcccctccagcacctttcagcctgctagttaggacgacccgccgccaccctccaggacctccagccctgcactgcctttcctctcttttaaataattcttcattgagttctaatatgtaaaaaaaaagtttactgtaaagtttgcaaataangaaattttttttaaaagtcctcagtaatcttaccagtaacaattgttatgggcacatttgcttttggaagatttcttttgtatgcatgggataagt

SEQ ID NO: 452 - DNA, 129 bp, Homo sapiens
acttttagatcacaaatttgcctttaagtaacacataatacacttaaggcagatttgccttacaggtggcctcagcttctaaacaccactacactgctttatataaaaaacaaaaatcacatagaagag

SEQ ID NO: 453 - DNA, 151 bp, Homo sapiens
  misc_feature 9, 10, 44, 46, 47, 150: n = A,T,C or G
actctcaanntgtatttaggtgccaacacatttaggatcattgngnnttctcagtgaattgacctttttatgagaataaaatgtctatttctgaaatgtccctatttctggaaatgttccttatactaaagtccaacttgtgtggattant

SEQ ID NO: 454 - DNA, 119 bp, Homo sapiens
  misc_feature 9: n = A,T,C or G
tgctgatgnagcatgctttttaaatcctttaaaaacactcaccatataaacttgcatttgagcttgtgtgttcttttgttaatgtgtagagttctcctttctcgaaattgccagtgtgt

SEQ ID NO: 455 - DNA, 515 bp, Homo sapiens
accttataaagttccttttcatccttctctgtcttcaactgacattcaagttgttctctttcatgttgtgccttcttgagtttggcctttaaactgtctaattcggtttctttttcaattgctttatgtgttactgacacaatatcttcctcaagctgatgggctttggatgtagcatcactgaacctcttcttaaactcttcattttccatttttaagctttgtgttacttcagtaagacccttttgttctgcttgcagttggtcacatctttctttctcatggttaagttctctttccattctcccaacttgttctcgaagttgtgctgtttctttttccagaacggcaattaactttaacagttcttctttttctttcatggttttctcaattttcaactcaagaaggcctgcttttgtggtcaccactaacatgtcagaatttccttcatcttccatagtaagcagctcttcaactggagaagaagctcgaaactggaaaggtgtacctgc

SEQ ID NO: 456 - DNA, 350 bp, Homo sapiens
  misc_feature 310, 326: n = A,T,C or G
actcccctccccaaatagaaacctcaaagactgatccatttcccctagggcctgggccaggagtagctcactgctcactgctgaggagaaaggcacaagatataatgtcataagagcaggacagtggctcagcctacagagttccctataggggaaagaaggcaggaaataggcgcagggtctggtcctgtccctgcaccaccctgagcagctagtcttgggaagggattacaggccctgggccataggctgctcgccattctgctttcctatcctgtttctctccctgtgctgctcccttttagccagngctgagaaatgttcancacctgaggcaaaactgccatagt

SEQ ID NO: 457 - DNA, 293 bp, Homo sapiens
gcagggccaacagtcacagcagccctgaccagagcattcctggagctcaagctcctctacaaagaggtggacagagaagacagcagagaccatgggacccccctcagcccctccctgcagattgcatgtcccctggaaggaggtcctgctcacagcctcacttctaaccttctggaacccacccaccactgccaagctcactattgaatccacgccattcaatgtcgcagaggggaaggaggttcttctactcgcccacaacctgccccagaatcgtattggttacagctggt

SEQ ID NO: 458 - DNA, 500 bp, Homo sapiens
actagactccagattaccctttcttaataaatatctcagggtaaggaaagaaagaaactgtatagatatatttaaaatagagaatactttccaagcaatacatgatgcctttcctaaaagactctaaaagaaaaagattctgtaactctcttttagcaccaaattattgtttatcttgctggatattttatatgaacagtgttaatttagatgcactaaagcaaaggtaggcaaactacaaccatgagtcaaacatggccacacccattcatttgctattgtctaagctggttttgcactacaactgcagagttgaatagatgcagcagatcctttacagaaaaagttttctgacctcaattctaaagtaattgtagtagggagctggaggactttctttccctttatggtaattttttgagctacaaaaagagccttgcagaaatgggtgaagggattaatcttttaaaaataaatgctatatattaggaaaataaaaa

SEQ ID NO: 459 - DNA, 394 bp, Homo sapiens
ggtgaaaagacttgattttttgaaaggattgtttatcaaacacaattctaatctcttctcttatgtatttttgtgcactaggcgcagttgtgtagcagttgagtaatgctggttagctgttaaggtggcgtgttgcagtgcagagtgcttggctgtttcctgttttctcccgattgctcctgtgtaaagatgccttgtcgtgcagaaacaaatggctgtccagtttattaaaatgcctgacaactgcacttccagtcacccgggccttgcatataaataacggagcatacagtgagcacatctagctgatgataaatacacctttttttccctcttccccctaaaaatggtaaatctgatcatatctacatgtatgaacttaacatggaaaatg

SEQ ID NO: 460 - DNA, 279 bp, Homo sapiens
  misc_feature 4: n = A,T,C or G
actnccgattgaagcccccattcgtataataattacatcacaagacgtcttgcactcatgagctgtccccacattaggcttaaaaacagatgcaattcccggacgtctaaaccaaaccactttcaccgctacacgaccgggggtatactacggtcaatgctctgaaatctgtggagcaaaccacagtttcatgcccatcgtcctagaattaattcccctaaaaatctttgaaatagggcccgtatttaccctatagcaccccctctagagcaaaaaaaa

SEQ ID NO: 461 - DNA, 278 bp, Homo sapiens
tttggacactaggaaaaaaccttgtagagagagtaaaaaatttaacacccatagtaggcctaaaagcagccaccaattaagaaagcgttcaagctcaacacccactacctaaaaaatcccaaacatataactgaactcctcacacccaattggaccaatctatcaccctatagaagaactaatgttagtataaagtaacatgaaaacattctcctccgcataagcctgcgtcagattaaaacactggactgacaattaacagccaatatctacaatca

SEQ ID NO: 462 - DNA, 556 bp, Homo sapiens
aacgtccaagggggccacatcgatgatgggcaggcgggaggtcttggtggttttgtattcaatcactgtcttgccccaggctccggtgtgactcgtgcagccatcgacagtgacgctgtaggtgaagcggctgttgccctcggcgcggatctcgatctcgttggagccctggaggagcagggccttcttgaggttgccagtctgctggtccatgtaggccacgctgttcttgcagtggtaggtgatgttctgggaggcctcggtggacatcaggcgcaggaaggtcagctggatggccacatcggcagggtcggagccctggccgccatactcgaactggaatccatcggtcatgctctcgccgaacccgacatgcctcttgtccttggggttcttgctgatgtaccagttcttctgggccacactgggctgagtggggtacacgcaggtctcaccagtctccatgttgcagaagactttgatggcatccaggttgcagccttggttggggtcaatccagtactctccactcttccagtcagagtggcacatcttg

SEQ ID NO: 463 - DNA, 659 bp, Homo sapiens
cacactgtgcccttccagttgctggcccggtacaaaggcctgaacctcaccgaggatacctacaagccccggatttacacctcgcccacctggagtgcctttgtgacagacagttcctggagtgcacggaagtcacaactggtctatcagtccagacgggggcctttggtcaaatattcttctgattacttccaagccccctctgactacagatactacccctaccagtccttccagactccacaacaccccagcttcctcttccaggacaagagggtgtcctggtccctggtctacctccccaccatccagagctgctggaactacggcttctcctgctcctcggacgagctccctgtcctgggcctcaccaagtctggcggctcagatcgcaccattgcctacgaaaacaaagccctgatgctctgcgaagggctcttcgtggcagacgtcaccgatttcgagggctggaaggctgcgattcccagtgccctggacaccaacagctcgaagagcacctcctccttcccctgcccggcagggcacttcaacggcttccgcacggtcatccgccccttctacctgaccaactcctcaggtgtggactagacggcgtggcccaagggtggtgagaaccggagaaccccaggacgccctca

SEQ ID NO: 464 - DNA, 695 bp, Homo sapiens
accttcatttgaccccatcagcttcagggccttctttacatttccactggcctgatccatgtatgcaatgctatttttgcagtgatatgtgatgttctgggaagctcggctggagagaagtcgaaggaatgccagctgcacatcaaggacatcttcaggaagttcaggattgccgtagctaaactgaaaaccaccatccatggactctccaaaccaaacgtgtttcttctcagcactagaatctgtccaccagtgtttccgtggaacattcaaaggattggcacttatgcatgtttccccagtttccatattacagaataccttgatagcatccaatttgcatccttggttagggtcaacccagtattctccactcttgagttcaggatggcagaatttcaggtctctgcagtttctagcggggtttttacgagaaccatcaggactaatgaggctttctatttgtccattaacagacttgagtgaagtcataatctcatcggtgttgattttgaaatccattggttcatctccataatacggggcaaaaccgccagctttttcacctccaatcccagcaatggcagcggctccaacaccaccacagcaaggaccaggggcaccaggaggtccaggagggcctggttgccctgggtggcctggggagccctcagatcctctttcacctctgttac

SEQ ID NO: 465 - DNA, 73 bp, Homo sapiens
caggtccagagctcccaggtttccaggttgcagtccctccagtcccagagctcccagggtttcggtttccagt

SEQ ID NO: 466 - DNA, 507 bp, Homo sapiens
  misc_feature 15, 453: n = A,T,C or G
agcactggcagaggnagccaaatatagtgatgtgcgccagagataagtattctcctctccaagcatattgctatacaagactttaaagacttcataaaagccaaacttgcagagtccctgcatggagtagccaaggaaagtcggagcccatcctttagccaaaccacgaacaccatcctctttaagtgtaactgagaatccgttaaatatgcccttgtacttttgggggtccacctgcatacggcatttcactaaatccaggggaaccacagcagtgtgtgtcagaccacaacttaagaccccaccaaagccacacagtgcataatacttcgcggagccaaattcacaactgtactcttccacggcggcggctgccaggttgcgagggcggcggggctggcccgtgggccctggggagctgctgcggaggtccccgagaccatcgtgcaccanctgcagatgtggcgtgttgaaggggttcgcccgcgccaggtgcgccacggacga

SEQ ID NO: 467 - DNA, 183 bp, Homo sapiens
cctcatgagctaccgggccagctctgtactgaggctcaccgtctttgtaggggcctacaccttctgaggagcaggagggagccaccctccctgcagctaccctagctgaggagcctgttgtgaggggcagaatgagaaaggcaataaagggagaaagaaaaaaaaaaaaaaaaagggcggccg

SEQ ID NO: 468 - DNA, 129 bp, Homo sapiens
  misc_feature 29, 81, 84, 90, 108, 110, 123, 128: n = A,T,C or G
gcggccgcgtcgaccggcgccgtcgggcnccgggccgggccatggagctgtggacgtgtctggccgcggcgctgctgttgntgntgctgntggtgcagttgagccgcncngccgagttctacnccaang

SEQ ID NO: 469 - DNA, 243 bp, Homo sapiens
  misc_feature 15: n = A,T,C or G
gcggccgcgtcgacnggccatggagactgtggcacagtagactgtagtgtgaggctcgcgggggcagtggccatggaggccgtgctgaacgagctggtgtctgtggaggacctgctgaagtttgaaaagaaatttcagtctgagaaggcagcaggctcggtgtccaagagcacgcagtttgagtacgcctggtgcctggtgcggagcaagtacaatgatgacatccgtaaaggcatcgtgctg

SEQ ID NO: 470 - DNA, 452 bp, Homo sapiens
cctcaagtacgtccggcctggtggtgggttcgagcccaacttcatgctcttcgagaagtgcgaggtgaacggtgcgggggcgcaccctctcttcgccttcctgcgggaggccctgccagctcccagcgacgacgccaccgcgcttatgaccgaccccaagctcatcacctggtctccggtgtgtcgcaacgatgttgcctggaactttgagaagttcctggtgggccctgacggtgtgcccctacgcaggtacagccgccgcttccagaccattgacatcgagcctgacatcgaagccctgctgtctcaagggctcagctgtgcctagggcgcccctcctaccccggctgcttggcagttgcagtgctgctgtctcgggggggttttcatctatgagggtgtttcctctaaacctacgagggaggaacacctgatcttacagaaaataccac

SEQ ID NO: 471 - DNA, 168 bp, Homo sapiens
  misc_feature 18, 37: n = A,T,C or G
cttctccgctccttctangatctccgcctggttcggnccgcctgcctccactcctgcctctaccatgtccatcagggtgacccagaagtcctacaaggtgtccacctctggcccccgggccttcagcagccgctcctacacgagtgggcccggttcccgcatcagctc

SEQ ID NO: 472 - DNA, 479 bp, Homo sapiens
  misc_feature 71, 87, 182, 218, 288, 322, 358, 386, 407, 423, 429, 473,479: n = A,T,C or G
gccaggcgtccctctgtctgcccactcagtggcaacacccgggagctggtttgtcctttgtggagcctcancagttccctctttcanaactcactgccaagagccctgaacaggagccaccatgcagtgcttcagcttcattaagaccatgatgatcctcttcaatttgctcatctttctgngtggcgcagccctgttggcagcgggcatctgggtgncaatcgatggggcatcctttctgaagatcttcgggccactgtcgtccactgccatgcagtttgtcaacgngggctacttcctcatcgcagccggcgttgtggtntttgctcttggtttcctgggctgctatggtgctaanactgagagcaagtgtgccctcgtgacgntcttcttcatcctcctcctcntcttcattgctgaggntgcagntgctgaggtccgccttggtgtacaccacaatggctgagcccttnctgacn

SEQ ID NO: 473 - DNA, 69 bp, Homo sapiens
gagcgatggagcgtgggtagggagggtccacagtgtccactcgccgtgtgcgaaggttgactcggtagt

SEQ ID NO: 474 - DNA, 155 bp, Homo sapiens
gccgccactgccgggagagctcgatgggcttctcctgcgcgccgcccggtgtctggccgagtccagagagccgcggcgcctcgttccgaggagccatcgccgaagcccgaggccgggtcccgggttggggactgcaggggaaggcagcggtggcg

SEQ ID NO: 475 - DNA, 282 bp, Homo sapiens
ggcttcgacgttggccctgtctgcttcctgtaaactccctccatcccaacctggctccctcccacccaaccaactttccccccaacccggaaacagacaagcaacccaaactgaaccccctcaaaagccaaaaaatgggagacaatttcacatggactttggaaaatatttttttcctttgcattcatctctcaaacttagtttttatctttgaccaaccgaacatgaccaaaaaccaaaagtgcattcaaccttaccaaaaaaaaaaaaaaagggcggccg

SEQ ID NO: 476 - DNA, 434 bp, Homo sapiens
ctccaggacagcgtccagcttggtgtcgttgaagacgaagtggagcggatggttgtagaaacgagtgatggtgctgagcggcgtgcagtcttcgggatccacgaaggccaagtccttgaggtagagcatgtccacgatgttggagcgctcctcctcgtacaccgggatgcgcgtgtggccgctctgcatgatgctggccaggacgccgaagtccagcacggtgctggcgtccagcatgaagcagtcttcgaggggcgtgagcacgtcctccacggtccggcagcgcagcacgcccttgctgagatcgctgtaggggtcgccgccgccgcgcgccagctccagcacccgctcccgcagccgcccgggccgcgccgccagctccagcagctgccccacgggcagcgcgacgggcagagtgagcaggacggccaggc

SEQ ID NO: 477 - DNA, 314 bp, Homo sapiens
ggcgggcgctagctggctccgggcagctcggccttgggggcttcggggccccgagacgcggggcgtatgagtggggcgtgcgctccacgcggaagtcggagcctcctcccctggatagggtgtacgagatccctggactggagcccatcacctttgcggggaagatgcacttcgtgccctggctggcgcggccgatctttccgccctgggaccgcggctacaaggacccaaggttctaccgctcgccccctcttcacgagcatccgctgtacaaagaccaggcctgctatatctttcaccaccgttgccgcctt

SEQ ID NO: 478 - DNA, 317 bp, Homo sapiens
aacagagtgatcattccagttaagcggggcgaagagaatacagactatgtgaacgcatcctttattgatggctaccggcagaaggactcctatatcgccagccagggccctcttctccacacaattgaggacttctggcgaatgatctgggagtggaaatcctgctctatcgtgatgctaacagaactggaggagagaggccaggagaagtgtgcccagtactggccatctgatggactggtgtcctatggagatattacagtggaactgaagaaggaggaggaatgtgagagctacaccgtccgagacctcctggt

SEQ ID NO: 479 - DNA, 171 bp, Homo sapiens
aggtgctttgctagatgctgtgacaggtatgccaccaacactgctcacagcctttctgaggacaccagtgaaagaagccacagctcttcttggcgtatttatactcactgagtcttaacttttcaccaggggtgctcacctctgcccctattgggagaggtcataaaatgt

SEQ ID NO: 480 - DNA, 65 bp, Homo sapiens
cccccagtggaaggctcccaccctggtagatgaacagcccctggagaactacctggatatggagt

SEQ ID NO: 481 - DNA, 207 bp, Homo sapiens
cacagcgtgctctgcggggtcactcccactttgttagtgatgtggttatctcctcagatggccagtttgccctctcaggctcctgggatggaaccctgcgcctctgggatctcacaacgggcaccaccacgaggcgatttgtgggccataccaaggatgtgctgagtgtggccttctcctctgacaaccggcagattgtctctggat

SEQ ID NO: 482 - DNA, 319 bp, Homo sapiens
  misc_feature 252, 258, 268: n = A,T,C or G
cacactgtgcccttccagttgctggcccggtacaaaggcctgaacctcaccgaggatacctacaagccccggatttacacctcgcccacctggagtgcctttgtgacagacagttcctggagtgcacggaagtcacaactggtctatcagtccagacgggggcctttggtcaaatattcttctgattacttccaagccccctctgactacagatactacccctaccagtgcttccaaactgcacaacacccnagcttnctcttccagnacaagagggtgtcctggtccctggcctacctccccaccatccagagctgct

SEQ ID NO: 483 - DNA, 233 bp, Homo sapiens
  misc_feature 212: n = A,T,C or G
acaggcccagtggcgcctagccttcagctgctgggctctcccgagcctgccttagcccatacaaccacttgatcacgcgggcattgcgctccaccaccgacacgccatagggaacgcgctcccgggcccgctcctcaacagtcaccgagctgcggcgggagcagcccccttcagagctgcccggcccagcactgggccctgccagggacacnatatccgagctggcccgtgcc

SEQ ID NO: 484 - DNA, 194 bp, Homo sapiens
agagcccttgctggggggtgcctgggagatggggtaagaagagctttcatttgtctggtagatagatagcatgtaagggggtggttgtcccaggaggcagctgctgacaggtttgctacacacagccccggactgtgttgcctgggtgctcattcagagaggggctatcatctgggagcctgtgcccctgggtc

SEQ ID NO: 485 - DNA, 67 bp, Homo sapiens
tccatatccaggtagttctccaggggctgttcatctaccagggtgggagcctcccactgggggaagt

SEQ ID NO: 486 - DNA, 70 bp, Homo sapiens
taccgagtcaaccttcgcacacggcgagtggacactgtggaccctccctacccacgctccatcgctcagt

SEQ ID NO: 487 - DNA, 257 bp, Homo sapiens
actcccgattgaagcccccattcgtataataattacatcacaagacgtcttgcactcatgagctgtccccacattaggcttaaaaacagatgcaattcccggacgtctaaaccaaaccactttcaccgctacacgaccgggggtatactacggtcaatgctctgaaatctgtggagcaaaccacagtttcatgcccatcgtcctagaattaattcccctaaaaatctttgaaatagggcccgtatttaccctatagt

SEQ ID NO: 488 - DNA, 378 bp, Homo sapiens
actctgctatggtgctggcttcctttaaactcaggatagatgccaggtgggctccgtttccgtaagactgacactcgagctcggcatcagaccagttcctcagcttcctgaagtaaccatagcaattggacttgtggtaaaaccatccaggagcacagctgggtctcatgatgatatcacccaggactcctgttttggccaggcagctcagcaataggagcagccgcatgcttctggaagccatcttcctcctaccctgaggatgtagctagtgcaaggatctcagagaccttactagcgcttctttgaaactcctgggttctccttgatctgcaaatctgtytggcaaccaagactctaagggcccctgccttcttc

SEQ ID NO: 489 - DNA, 429 bp, Homo sapiens
ccgaggtacacagaagtttgaatcacaaaacataattaccacaataaaacacagtgttcaagtatcttggcagagcaatctgccgcacaaactgcaaattaaattaactacacagactaaaaactatacagcctaccatcaacagttgtgcattataaaaaggtagtttctttccttttgttttaagtcaggaacaggtagatttttaaaaatatatatacaagctaacacacacrgctatcagcactaatgcccccccctcaacttttcctttttcttatagaaaatggaaagcttacaatacctcstcsrtymwrgmrscagrcctwcgagccwgcctgrasagggtkwgcmktggarmagmtstgkcctgaggtttagagccgctttgtgcggggatggtggaggctagggtgggggtgagaaaag

SEQ ID NO: 490 - DNA, 532 bp, Homo sapiens
ttggattgccacacggctcacattgcatgcaagtttgctgagctgaaggaaaagattgatcgccgttctggtaaaaagctggaagatggccctaaattcttgaagtctggtgatgctgccattgttgatatggttcctggcaagcccatgtgtgttgagagcttctcagactatccacctttgggtcgctttgmgktgtgatatgagacagacagytgcggtgggtgtcatcaaagcagtggacaagaaggctgctggagccggcaaggtcaccaagtctgcccagaaagctcagaaggctaaatgaatattatccctaatacctgccaccccactcttaatcagtggtggaagaacggtctcagaactgtttgtttcaattggccatttaagtttagtagtaaaagactggttaatgataacaatgcatcgtaaaaccttcagaaggaaaggagaatgttttgtggaccactttggttttcttttttgcgtgtggcagttttaagttattagtttttaaaatcagtacctc

SEQ ID NO: 491 - DNA, 567 bp, Homo sapiens
tcgaggtacaaaagcccttcaaaaggagttcagcttttataaacaccaaaacactctctgcctgtaaaatgtttttgctgaaatttgtatcattaactctcaaatttacatcttcatgtttgagatacgcttttaggactgtctatgcatgtagactttggtcaactctctcctcctccctcaataaatcagttaacttaaaaaatatattgtgaccatttttataaaatacatgttcataaaacagatcaacatatttagcttatacagaaataaaattaagtcaatccactcacaaagaatttctattttgtaaaaatgtagcttgtatttcagtataataaaatctgatgcaaaaaacctgcccgggcggcaagtgtgctggaattctgcakatatccatcacactggcggscgctcgagcatgcatctagagggcccaattsgccctatagcggcgcattaagcgcggcgggkgtggtggwtacgcgcasygtgaccgmtacacttgccarcgccctagmgcmcgctcctttcgcwttcttcccttcctytctcgccacgttc

SEQ ID NO: 492 - DNA, 422 bp, Homo sapiens
agtgtgctggaattcgcccttggccgcccgggcaggtacaagactcaataatcacctgactgagctccaattaactgaggagaaacggggtggaggagagggctggttgctattcagacttgataatgagattgatctgtcccatggagagtgaaagttcagttccacttctgcctccttctttccatgctgtcctcatgctctttatcctcacttcctcagtcccttcaacactcaaaatctgattttatttctctctcacacgtatcaggggcagtttctgaagttgctgaggttgaattttcttcacaaacctctataaaacatcagcagagaacatataaatacattttgattagcatacattgcaaaatttctcccacaatgtcaggggatgaaagcaggtggtccccactgagagt

SEQ ID NO: 493 - DNA, 318 bp, Homo sapiens
  misc_feature 283, 311: n = A,T,C or G
agtgtgctggaattcgcccttagcggccgccctggcaggtaagctttttttttttttttttttttttgatgattaacatctttaattcaaatgkaaaagttcaatacaagccatttatagggcttgagatttgttggtcttttaaaaacaaraaatggggaaatgcaacaaaatgacctttccacttttcaaaagctttcaagtaaaggatagatcatagggccataaaagatccatttaatsaaacccacttttyaccccctaccaattgtcttacacccantccacaatcttaatacatattcctgaanatttaca

SEQ ID NO: 494 - DNA, 360 bp, Homo sapiens
accttttactacaacaagtaaacatgcataataaagtaggattcatccaatgtctgacctttctttgcatcaaaagaacatttccggccaggcacggtggctcacgcctgtaatcccagcactttgggaggccgagccaggtggatcacgaggtcaggagatcgagaccagcctggctaacatggtgaaaccctgtctctactaaaaatacaaaaatgagccgggcatggtgggggggcaccgtagtcccagctacttgagaggctgagacaggagaatggcgtgaacccggggggcggagcttgtagtgagccgagatcgcgccactgcactccagcctgggtgacagagtgagactcc

SEQ ID NO: 495 - DNA, 329 bp, Homo sapiens
  misc_feature 269: n = A,T,C or G
gaggtctgggatggggcttcactgctgtgacttcctcctgccaggggatttggggctttcttgaaagacagtccaagccctggataatgctttactttctgtgttgaagcactgttggttgtttggttagtgactgatgtaaaacggttttcttgtggggaggttacagaggctgacttcagagtggacttgtgttttttctttttaaagaggcaaggttgggctggtgctcacagctgtaatcccagcactttgaggttggctggganttcaagaccagcctggccaacatgtcagaactactaaaaataaagaaatcagccatgaaa

SEQ ID NO: 496 - DNA, 292 bp, Homo sapiens
  misc_feature 166: n = A,T,C or G
acctgggatgaggtgggtggagctttgaatctaccactatccaggccacacacctagaagctctggtttcattgtttcattgatttcattgttttgattgatgctgaccttaggcagcagagttttcaatgctctccaggtgtttctaaagtgcagacaagtttangaccgtgcttgagggtgaagggcaggactgtgatggggaggggcaaatatggggcccttggggtgcaggcaatggttttccttgacctgaatgggggtctcacaggtgttgcatatacatatacgt

SEQ ID NO: 497 - DNA, 549 bp, Homo sapiens
tcgaggtaccgaccatagagcaagaatcaagattctgctaactcctgcacagccccgtcctcttcctttctgctagcctggctaaatctgctcattatttcagaggggaagcctagcaaactaagagtgataagggccctactacactggcttttttaggcttagagacagaaactttagcattggcccagtagtggcttctagctctaaatgtttgccccgccatccctttccacagtatgcttcttccctcctcccctgtctctggctgtctcgagcagtctagaagagtgcatctccagcctatgaaacagctgggtctttggccataagaagtaaagatttgaagacagaaggaagaaactcaggagtaagcttctagcccccttcagcttctacacccttcggccctctctccattgcctgcaccccaccccagccactcaactcctgcttgtttttcctttggccatgggaaggtttaccagtagaatccttgctaggttgatgtgggccatacattcctttaataaaccattgtgtacctgc

SEQ ID NO: 498 - DNA, 412 bp, Homo sapiens
cttgaagctgggaggtggaggttgcagtgagccgagatcacaccactgtactccagcctgggcaagagaatgaaactctgtctcaaaaacaaaaataaaaacaaaaaaaaaactcttgtcattctggaaatgtccacaattcagtcttcacctgcctccatcctcatgaaggcaccaggggagcgcggtgggctcacctgatttcttggttaggtctgttctgttccttttttatgcggggtctgtcggtgggcactgctccaatgtgaggggtccaggctccatcgtagcctcttaaccagctcagtgccaggaagggtggactttgacaaaaacccacctcaaatctgcactccccaacctggagtgcaacctgtggcaagctccctaggctctctgggcctcagcttcc

SEQ ID NO: 499 - DNA, 447 bp, Homo sapiens
acttttaagaatatactttgatttaatatgtatgttagtaaaactccacgtgttgtaaccattattatgtttttgtttttaaaatggggatgtaatactaataaccactacctataaaataaagcacacaattgttccggcgattttacaaatctttttttccaggtgtaaagtctacaaaaattccaaaaaattagagaacactgaaaacatattaaagtttgacatccaactttatagtatttccatgttaccctgaaagataacttaaaaaatatggccttcttagaacaggccactctgctattataaaaaattggtgacagcaagaaattgtatcactgatatgtggaatttttgtaaatagttttctctccaaatcattagaaaaatgttcaaaaataaaaacaaaataaaatatggtggtggtccctaaactattttgaa

SEQ ID NO: 500 - DNA, 527 bp, Homo sapiens
gtttgcttcttgcatctgattaactagaatatttctctttcccccttttaatttgtgatgtcacttgaccccatttatgtgtaggagcactacaccattggtttccaatactgcacacataagatacatacttgtgtgcagaaagtatcttcctccaggcttgtaatacccttcacatggaagattaatgagggaaatctttatattctgtataaaaacaaaagcaaatttatatactaaaatcatttgtctaaaaatttaagttgttttcaaataaaaattaaaatgcatttctgatatgcactgattgtgttgcctccagctttttttgctctctatgagtgactacttaagtcacttgttgagagggattatttactaattatatacttctcattcctgtaactccattccctttaaacagtggtgatatcaaatatacttccatccattgaatggggtatttttaacaacaacaaaagtgatatactaaaaaatgtattgcttaaggcttattgaatcatttt

SEQ ID NO: 501 - DNA, 304 bp, Homo sapiens
gaggttgccgaccaaagagaccattgagcaggagaagcggagtgaaatttcctaagatcctggaggatttcctacccccgtcctcttcgagaccccagtcgtgatgtggaggaagagccacctgcaagatggacacgagccacaagctgcactgtgaacctgggcactccgcgccgatgccaccggcctgtgggtctctgaagggacccccccccaatcggactgccaaattctccggtttgccccgggatattatagaaaattatttgtatgaataatgaaaataaaacacacctcgtggcaa

SEQ ID NO: 502 - DNA, 425 bp, Homo sapiens
actgattgtcatcctgactttggcattggcagctcttatattccgacgaatatatctggcaaacgaatacatatttgactttgagttataatatggttttgtgacttatgagctgtgactcaactgcttcattaaacattctgcattgggtataatctaagaattgtttacaaaaagattattttgtatttacccttcattcctttttttgatccttgtaagtttagtataaatatatctagacattcagactgtgtctagcagttacgtcctgcttaaagggactagaagtcaaagttccttgtctcactatttgatctgctttgcagggaaataacttgttttttctcatgtttcatcttctttttatgtaaatttgtaatactttcctatattgccctttgaaatttttggataaaagatga

SEQ ID NO: 503 - DNA, 256 bp, Homo sapiens
  misc_feature 224: n = A,T,C or G
accagcagtgtgtcaggtgctgcagagcgttcttggagaaggcccactgaggcaggttcgtgccctgctgcggccagcctgactagaccccaccctgaggtcctgcatttctcagtcggtgtgtaatcacgttccagggcccaaagcccagctctttgttcagttgacttactgtttcttaccttaaaaagtaattgtagatggaaatcagttgtgtttggcangagaatcaataaaaatctttgattcagacagc

SEQ ID NO: 504 - DNA, 255 bp, Homo sapiens
  misc_feature 166: n = A,T,C or G
actgttaatgatgttaatgatttttttttaaactcatatattgggattttcaccaaaataatgcttttgaaaaaaagaaaaaaaaacggatatattgagaatcaaagtagaagttttaggaatgcaaaataagtcatcttgcatacagggagtggttaagtaaggnttcatcacccatttagcactgcttttctgaagacttcagttttgytaaggagatttaggttktactgctttgactggtgggcctctasa

SEQ ID NO: 505 - DNA, 485 bp, Homo sapiens
  misc_feature 70, 180: n = A,T,C or G
agcttggtccgagctckgatcccctagwaacgccgccagtgtgctggagaattcccccttagcgtggtcnttgcccgaggtacagaaaacccaaaggcaaccacatagcatatgtaaaatgtgcaaatcactttaaaatgcaagttattctatagcatttgcaagatagaatttcactgnaattagggaatctagttcatcctaacttaatagtcttttgcatgtatagacaatgcaattctacaaggcacaactcagcgttgatgctaaagtatgaaacacatcctcagattatttatttgaaaatattaaaatagcatcgtttattattttttaatgagtcatgagctcatttctaaagcttcataaagcattacactgataacatatgtgtggtcaggacaaactgttccctgaacttaagaggtgaaggacaagaccccatattattatcctgtattaaaaaaggaaatatacatatatgt

SEQ ID NO: 506 - DNA, 230 bp, Homo sapiens
acaactccaaaaggagacattggagaagaaccaagctgggtctataaggaattgcacatgagatggcacacatatttatgctgtctgaaggtcacgatcatgttaccatatcaagctgaaaatgtcaccactatctggagatttcgacgtgttttcctctctgaatctgttatgaacacgttggttggctggattcagtaataaatatgtaaggcctttctttttaaaaa

SEQ ID NO: 507 - DNA, 179 bp, Homo sapiens
acctacttctccacaccgctgttgcttgggaaaaagggcatcgagaagaacctgggcatcggcaaactctcctcttttgaggagaagatgatctcggatgccatccccgagctgaaggcctccatcaagaagggggamtatccsgtgaacaccctgaaaagakccgctgtgacgggtgg

SEQ ID NO: 508 - DNA, 321 bp, Homo sapiens
acagagttttatataaatttaaaccaatttttaaaacaaaactgcggacaccaccataaaaatggaatcaaaagaaagttaatttatgaaattaagaggtcagcagaatatactcagtgatggaagacacttgggaaagtctttttaatagaacaagaacgatcttaatttaagaatattatcctggtttaacaacagtgccctgtttacaacagattgtgccctatctcatctgcagccgaggaataaaggattctgattagaaagagggttgcctacagattagtaagcaattccttggatcttatgcacagaacttgt

SEQ ID NO: 509 - DNA, 176 bp, Homo sapiens
acgtgggatacgggtcatgggcagagctcctggcctcagtgatgcctcctgatctatccataggcctggaagatcagcactgggatgacgatgagcagaatggtcatgaggatgcccasaatcagggcccacatgttcaggcacttggccggtggatgcatargcctgggcccctg

SEQ ID NO: 510 - DNA, 298 bp, Homo sapiens
  misc_feature 246: n = A,T,C or G
accaactttatatcatatgtttatacaatttaatttaaaaattcattttaaggaagacagataatttgaaagacttttgtttttcttgacttaattcatgaagtatcattttttgactgagtctccatttacttcattcttaatgattattgtcatccctttaaatctgtgcctttttcttcttgagcgaagctgtttgagtaaacctgttgaagagtgtttgtgtcttttgtgcttttttgttgntattaaaacaccaactaaaccttatagtcaagacaaggctctatgtttctgt

SEQ ID NO: 511 - DNA, 345 bp, Homo sapiens
acagatttttgtatagctgataagattctctgtagagaaaatacttttaaaaaatgcaggttgtagctttttgatgggctactcatacagttagattttacagcttctgatgttgaatgttcctaaatatttaatggtttttttaatttcttgtgtatggtagcacagcaaacttgtaggaattagtatcaatagtaaattttgggttttttaggatgttgcatttcgtttttttaaaaaaaattttgtaataaaattatgtatattatttctattgtctttgtcttaatatgctaagttaattttcactttaaaaaagccatttgaagacctaaaaaaaaaaaa

SEQ ID NO: 512 - DNA, 459 bp, Homo sapiens
acttatttcaacaattcttagagatgctagctagtgttgaagctaaaaatagctttatttatgctgaattgtgatttttttatgccaaaatttttttagttctaatcattgatgatagcttggaaataaataattatgccatggcatttgacagttcattattcctataagaattaaattgagtttagagagaatggtggtgttgagctgattattaacagttactgaaatcaaatatttatttgttacattattccatttgtattttaggtttccttttacattctttttatatgcattctgacattacatattttttaagactatggaaataatttaaagatttaagctctggtggatgattatctgctaagtaagtctgaaaatgtaatattttgataatactgtaatatacctgtcacacaaatgcttttctaatgttttaaccttgagtattgc

SEQ ID NO: 513 - DNA, 422 bp, Homo sapiens
gccccgtagtgatgagcactgactggttcactggccacattttagttcttcataataataggccacaaaagggctctgtggtttgcctccatgtgcactggcccctccccacccctagggggcactcagtagctgctgagaaggcctgtccacgaggctgttggaacccctccaataaatacttagaggtagtgtatctgatgcttgttttcgtggagaaaattgtattggagaacttaaaacatcacgaatatttttaataggatccgcagacacccaaaggagaagcttggtcttttccaggtatttccaacttgagttcagcccaaagcctttgaaaggaatgcattaccacatgaccacatgctgagaccccatggggtctaacacgggacctaagaaagtctctgcagccagatagt

SEQ ID NO: 514 - DNA, 326 bp, Homo sapiens
accagtatagtaatatctgtatactaactagggctttgtattgtcaataattttttaataattttttaatgaggtatttaccactgaagaaatatgataatataaaaccatcaaattttataattgagatgatactctggaaaaacatgtcatttcattttcagaaaactcttaagctctcttcagtctctgtaatgtttctgattgcatgtttcttcatgaaaagtatgttgttgttttgatagtaataataataaatgtaggctcagttctttcccaggattttcatcaaaaagctttaagtgcctaaccctgcttgtctctgt

SEQ ID NO: 515 - DNA, 323 bp, Homo sapiens
accagatgtagctaggaaaacccaaacgttccttggatcctgagacagctggtaagcacccaggccggctagactgccaaagagcagccctgcagccagggacggcacgctgcctgcttttacatagccaatgatcccaccagaagcaaccagtgctgcgtagccaaagccaaaccaatgcaagggcactactgagccagtgtcctgcatttttctcttctctgtccagacaggagactaccccaggcctgcaccggtctcacgaaggccccggctgtctacaagggcgcgcaagccgcaggaatgactgcgaggtgtcgccg

SEQ ID NO: 516 - DNA, 403 bp, Homo sapiens
accccgttggggttcatttcctgcccaagaagctggatgaggcagtggctgaagcccacctgggcaagctgaatgtgaagttgaccaagctaactgagaagcaagcccagtacttctaaatactgagtgaatacatcacagattgcataaagtgcatgattgcaagttgttgtcatccattcagctttctctgtctgttgttctggcaatttcatattgtcaaagattctgaaaacaattctaaataaatcctgccaccagtgtttctcataagtgtggccatatgttttcattatttcaaacattactgttaaacccctggttcttacatctaatttgcatctattgatgatacaggataactcaaagagaattgggaaccatcctctcacccacaccctgt

SEQ ID NO: 517 - DNA, 360 bp, Homo sapiens
  misc_feature 335: n = A,T,C or G
acctgaacgaagtcgcgggcaagcatggcgtgggccgtattgacatcgtggagaaccgcttcattggaatgaagtcccgaggtatctacgagaccccagcaggcaccatcctttaccatgctcatttagacatcgaggccttcaccatggaccgggaagtgcacaaaatcmaacaaggcctgggcttgaaatttgctgagctggtgtataccggcttctggcacagccctgagtgtgaatttgtccgccactacatcgccaagtcccaggagcgagtggaagggaaagtgcatgtgtccgtcctcaggggccaggtgtacctgmccgggcggccnctaacggcgaattmtgcagatatcc

SEQ ID NO: 518 - DNA, 255 bp, Homo sapiens
cataaatattatactagcatttaccatctcacttctaggaatactagtatatcgctcacacctcatatcctccctactatgcctagaaggaataatactatcgctgttcattatagctactctcataaccctcaacacccactccctcttagccaatattgtgcctattgccatactagtctttgccgcctgcgaagcagcggtgggcctagccctactagtctcaatctccaacacatatggcctagactacgt

SEQ ID NO: 519 - DNA, 449 bp, Homo sapiens
accttcctctcaattttgctgtgaacctgaaatggctttaaattaatactcttattttttatttaatttaattacataaattaaaccttaccatgaccaaattgtgttaggacggcctgctatctacagcacagtgtgtcatttgcagatttgtggttacctataccacgctaggtgttttgacatgtttagtatttctgctttacagtgctgaattccatattttagaagctatgaaagtccttttatgaaaaagttactgattgcttctcagttattaggaaaacagttgtttcacaattattatgtagatatgatgcccaaatatcatttttagtatatcttgtcgatctttaagttgttactattgtgttattcatgtctttaaatcagataccaaatattttttaggaaagaaaaatgttattactgtcattaggttggctttt

SEQ ID NO: 520 - DNA, 92 bp, Homo sapiens
acccccatcacagcagtcaaacagcctgagaaagtggcagctaccaggcaggagatcttccaggagcagtyggcaryagggccagagatccg

SEQ ID NO: 521 - DNA, 123 bp, Homo sapiens
acagaggggacaacaatgaatcagaacagatgctgagccataggtctaaataggatcctggaggctgcctgctgtgctgggaggtataggggtcctgggggcaggccagggcagttgacaggt

SEQ ID NO: 522 - DNA, 303 bp, Homo sapiens
  misc_feature 277, 284: n = A,T,C or G
acaaaaaaatgaatgttacaaaaatcacgtaaaaaaaactaggctcaaggaagcagccgcccttgcaagagggctcaaggcacctgagaggctgagaagaggccaacctggccatgggcgtggctgcatggacagctcttccctcctgcccttccccagatgcccttccctcctgccccgaggggcacactccctctccccaattacaggtgctacaaaactgccttgaataccaccgccaaggcactgccagagatgaaatgggccctgagcagangcctcangctctccctcccccgtagc

SEQ ID NO: 523 - DNA, 424 bp, Homo sapiens
acagtgcatggtgctgtcacttggaaagcctttcaatgttgtcttcagattgttgtgatgaatatgaaacatgcagaccctcctttataaagaaaaagaccttaaaacttgaatatgagataattttacattttaaaagtttatttgattttcatattattcactttcaaagccctttcaaatagaaaaggtatgaacttttggggggataatttatgtatcgtaaacttattagaacaaaatattcctgatgtataatgagttgttttatttatacaactttttcaatggtagtttgcactattctttattatgctacaggtttatttattatgaaacaaaggaatatgtattttatgtattttaccatgcataggttaactctttgccacagatttattggtcttgatacacctaaaataaa

SEQ ID NO: 524 - DNA, 172 bp, Homo sapiens
acaatttcattgcagacacaaagacttaagagtttcaaagaattttttaaaataaaaaaaaaatttgcacttattcctcacaaaatcttcacttttggaactatcccaattgaagctacacactgaatttattaatacagcattaagtttctttgtgtaaaaaaatctttgt

SEQ ID NO: 525 - DNA, 256 bp, Homo sapiens
actccttcccagttttttctttatactgagccttcagggacagtaagcattctacagcttcatttattttagccttaggggatttttcagcttttagcttacgaaccacctccccttgtgcagcaacttcatcatacagagatttactttccagaatacttgctgaggaattagaagaaatattctgtcctatttcagcaggagggtttccaggtttatattcctggccagttttctccttatattcaagctttca

SEQ ID NO: 526 - DNA, 479 bp, Homo sapiens
actggagatgtatttgataaccaaggttttaggtaaattttcaccagtattagttctatttgcaaactgaaaaatgttgtaggcttaatataaaataaccacattagtgaacattatatctcttagaagaaaggccatattttgctcctgcttctgtaaaaatattatttgtttgaaggggaaataatggtagtgtgacctttcacttaattcctactcccttaatgtgagagagacaaaatgagctgaagaaggaaaattctggagttacactccacaaccttgaacatactgacggacatctctgttttgacaacgatttctccatgccacccatgctctaatgccttgtggatcacggacaaccctctttgcacaagctacagcatcagcgatgttatcttgcagcaaagcactgcaggataaatgacaggcattaactgctcctggggttttgccatcattacaccagtagcggc

SEQ ID NO: 527 - DNA, 220 bp, Homo sapiens
accaaattgaagggtttagaggccctcaaatgggcatcactcataaaggcaattttcatggtttaatatagaaattactctaatgtgagaacacaacatgggaactattcaaaatacacctttctatgcaaaattgagtttgyatctattttagcattttaaatgagcactctgcaactgagaccaaatatcaatcatctcttgaggttttctactatgt

SEQ ID NO: 528 - DNA, 373 bp, Homo sapiens
acamcatcgatgaaattcagacatacaatgtaaagttgaaataatcccaaattattttacattatttatgtatactttacaaataacacaaatatggaaatgttttcttggaaagctgttggaactgtaagcactgcaacgtatgaaagaaacatatttagcaataaaaaatttaataatatcctacaactgaattagttgcatatttataccattcaaaatcttgattttaacctcattcactcctttgaaaaatacattcctcttttgttcttttaaatgcaaaattagtggcagttgcagcaaaaacgccgaaattctataagaaaaaaactgatttaccccaaacatatcattcagcacaaactgcggt

SEQ ID NO: 529 - DNA, 344 bp, Homo sapiens
acatttctaagtcaaacacttgtgacttttgctttaattccatgaatgttcctgcctccttgatatttgtatttattctttttttctctagagtagaggtataattgtgtgatatttcagaaatacagataaatgattcaaaaagtcacagttaaggagaatcatgtttctttgatcatgaataactgattagtaagtcttgcctatattttcctgatagcatatgacaaatgtttctaaggtaacaagatgagaacagataaagattgtgtggtgttttggatttggagagaaatattttaatttttaaatgcagttacaaattataatgtattcatatttgt

SEQ ID NO: 530 - DNA, 354 bp, Homo sapiens
accattgctctttcctagctaaccctagatatggcagctctttaatgtacctgagatcctggtgcacaacatagtgatcttcatgcgaacttcagtgaagatttcatacattggcctcatgacccagagctccttggagacacatcactatgtggattgtggaggaaattccacagctatttaacaactgctattggttcttccacacagcgcctgtagaagagagcacagcatatgttcccaaggcctgagttctggacctacccccacgtggtgtaagcagaggaggaattggttcacttaactcccagcaaacatcctcctgccacttaggaggaaacacctccctatggt

SEQ ID NO: 531 - DNA, 418 bp, Homo sapiens
acacatcccatcttcaaatttaaaatcatattgtcagttgtccaaagcagcttgaatttaaagtttgtgctataaaattgtgcaaatatgttaaggattgagacccaccaatgcactactgtaatatttcgcttcctaaatttcttccacctacagataatagacaacaagtctgagaaactaaggctaaccaaacttagatataaatcctaccaataaaatttttcagttttaagttttacagtttgatttaaaaacaaaacagaaacaaatttcaaaataaatcacatcttctcttaaaacttggcaaacccttccctaactgtccaagtatgagcatacactgccactggctttagatactccaattaaatgcactactctttcactggtctgaatgaagtatggtgaaacaagt

SEQ ID NO: 532 - DNA, 583 bp, Homo sapiens
  misc_feature 497, 498: n = A,T,C or G
cgtcccaacaattatattactaccactgacatgaccttccaaaaaacacataatttgaatcaacacaaccacccacagcctaattattagcatcatccctctactattttttaaccaaatcaacaacaacctatttagctgttccccaaccttttcctccgaccccctaacaacccccctcctaatactaactacctgactcctacccctcacaatcatggcaagccaacgccacttatccagtgaaccactatcacgaaaaaaactctacctctctatactaatctccctacaaatctccttaattataacattcacagccacagaactaatcatattttatatcttcttcgaaaccacacttatccccaccttggctatcatcacccgatgaggcaaccagccagaacgcctgaacgcaggcacatacttcctattctacaccctagtaggctcccttcccctacccatcgcgactgatttcactcacaacaccnntaggctcactaaacattctactactcactctcactgcccaagaactatcaaacttcctggccaacaacttatatgactagcttac

SEQ ID NO: 533 - DNA, 529 bp, Homo sapiens
gaggtacttaataaccaagtctcggaacactgagccatcacctgcaatgtttcctagagcccagacagcttgttcactgatgtgagcatggggagatgccaacagagaaatgaatgctgggatggcacctccatctaccacagccttggtttgttctgatgtcccagaagcaatgttagtgagtgcccaagcagattcaaactgaatgggactacaatcagttctgcccaagaaggacacaaatttcggaatcaaaccagcccggattatgttgtctatggggggctgtttttctctggaaagtagtttcctggcagcttgagtagcttggagctgattttccacattgctgctatttatgcctttgacaatgtcatcaacagaccaatttacagtgccctggttgttgcggttttcctgcagcggagaagtagcatcatcaggaaatgagcttacatttctcctcttcagcatctggtcatccttcttagctttcctcagctccacattgacctctattctgcgacgc

SEQ ID NO: 534 - DNA, 297 bp, Homo sapiens
actcattaatattattttgttttgagaaagccagaaatgattctaagaaataaacaataataataaaagatgtaattaatatactgtatcccttttaagccaaagcacactttttacctcaagactgttctgacttttacattcttaatttcctttgtccaaaataggaccccattttaaatagagttcatttgaattgagttcataatctaaagtcacttttccccacaagatgttttcatttcagtatataaactgctaagcggcaaatgactaagtcagttataaagaatttgt

SEQ ID NO: 535 - DNA, 373 bp, Homo sapiens
actttccagggcacagcctggacgaatgatgccaaactttccgggcacagacaaatcaaccacagttgagccaaggcgacactcggggctctggccatccccaatttgtcccccatcaataaccaaggacaactgaggccagagatcctggaactcctcgacattcagagaactggcctgggagctgaggttggcactagtgagagcaagcggaccctcaaacatctgagccaagtcttgcataaaagcatgatcaggaatccgaatgcctacaagaggcgtaaaagggtttaggtccttgttgagctcctccgagcgttccatcaccagggtcactggtcctggcagtaggtctttcaggagcccctcaggt

SEQ ID NO: 536 - DNA, 254 bp, Homo sapiens
acatgctccattaaattaaatgtcatccaacatttatcaaatattgtcttagttacagcttgatacctatctaaattcatattcgagcaaaactaggccccgaaagtgcgtttgtggctctgcacctccagaagtgagttcaaaaaacctgcagctcatcagaactgcaacaataactcttaatattttcttgtgacaaaaaaaaaaatcaagtttacttcaatatattttcaaatatttactggaagtaatgt

SEQ ID NO: 537 - DNA, 449 bp, Homo sapiens
acagacttgtttttgagtgttgagtagcagggacaaaataagggaatgttattttttaagaaaattcattttcattgttgtctccttccttttctgtgaaagtcctcatactgagaaatttgtatattttatattaaatcacttactattgatttttgttgtgattttcaaaggtggattcccacagataaaatcttggctattgcccaaaacatagtaaagggtcacgtgtgactttttataataggaagaaaattctgcctttgtgagtgcacatgtccacatttcatccctccttccctcaaaaccctagagaggggcattaaagaattgttgatgtatatgcaatgtctgttaagcatgcactatgtatttcatcctcatttattgggtctgggactgaagtttttagccagcatggacctaacctactttttgggataaaattc

SEQ ID NO: 538 - DNA, 328 bp, Homo sapiens
actcagcgccagcatcgccccacttgattttggagggatctcgctcctggaagatggtgatgggatttccattgatgacaagcttcccgttctcagccttgacggtgccatggaatttgccatgggtggaatcatattggaacatgtaaaccatgtagttgaggtcaatgaaggggtcattgatggcaacaatatccactttaccagagttaaaagcagccctggtgaccaggcgcccaatacgaccaaatccgttgactccgaccttcaccttccccatggtgtctgagcgatgtggctcggctggcgacgcaaaagaagatgcggc

SEQ ID NO: 539 - DNA, 506 bp, Homo sapiens
tcgaggtactttggcctctctgggatagaagttattcagcaggcacacaacagaggcagttccagatttcaactgctcatcagatggcgggaagatgaagacagatggtgcagccacagttcttttgatgtccaccttggtcccctggccgaacgtccagcggagagactgttggcagtaataaatggcaaaatcatcaggctgcaggctgctgatggtgagagtgaattctgtcccagatccactgccgctgaaccttgatgggaccccactatgtaaagtagacgccttatagatcaggagattaggggctttccctggcttctgctgataccaggccaaccaattattaatattctgactggcccggcaagtgatggtgactctgtctcctacagatgcagacagggtggaaggagattgggtcatctggatgtcacatttggcacctgggagccagagcaagcaggagccccaggagctgagcggggaccctcatgtccatg

SEQ ID NO: 540 - DNA, 519 bp, Homo sapiens
tcgaggtacctttccttgtttcctagaattcctaaggaggaacaacaacaaaatcggggtttgttcagcaattgcaccacatctctaaaaattaaaacattattcagtaagtgaaggtttctgataaacaagtggatcaaactgaatatttccaattaagaaagttcacaataatacagtagtgtattattaccaataggaaggcctaatagtcgactattattttttaaggcaagaaaaaagaaaacaagtgcaagctatgccaagctttggtgaatgctgtccttggcattgcaagtataaagtttgtttaaaaagaaaagggaaaaattaaactaatgcttcaacaaccacagaataaggtttaggactgcaaagaaagaggaaaaaaagaaacattattcctctccaattatactgccaagcattcacaagtgagctagggatcataaggttaattatacatttaataaggtgtcagggagataactgctcatttctttataaaaattaaaatgt

SEQ ID NO: 541 - DNA, 431 bp, Homo sapiens
acttgaggcttttttgttttaattgagaaaagactttgcaatttttttttaggatgagcctctcctagacttgacctagaatattacatattcctccagtaagtaatactgaagagcaaaagagaggcaggattggggtcacagccgcttcttcagcatggaccaagtgggccttggggattgcagcgttctcgaagtggctgtaggactcgaatttacagaaagccacagaggtgcaacttgaggctctgctagcaagccaccagtgaggctattgggtaaccacctttctatacaggagattggaatctactttgtcatttatccaccacagtgacaaaggaaaagtggtgccgttatgcaatccatttaactcataaacatattactctgagtaactggccagccattcatcggatccttcattgggt

SEQ ID NO: 542 - DNA, 502 bp, Homo sapiens
acaaaaaaggaaataagaaagtagtgacagcctatccatacaaaaatcaaaaagacacaaaggaagatagaatgagaaacagacctacaagaatcattaaacaataaaataacagtaatctttgtcttcagaaaataaatattttaaaaatagacttgccaatcaatacacatacattgaatagagggattatataaaattttatataccaagatccaacttgcctctcttcaagagtcacttgagatctagtagtgaaatcagcctgaaagtggcaagtggaagaagacattttaggcaaacatcaaccaaacgagagcagaagagatcaaaattgtattatacaaaatacatcgtaagtcaacaactctcttattttataaaatatactttatgtcaaaattcacaagagaaaaaaggtcattaaacaataataaagatatcatttattgaaaatgtatgacaaatatgtgcatacatatatttatatgtttgtgtctgt

SEQ ID NO: 543 - DNA, 452 bp, Homo sapiens
  misc_feature 403: n = A,T,C or G
actacaagggcagtaaaacaatgatacactggaaaaaaaaaaatgcagcaataaacatttgttaaaaagactgatagaataaataaaactacaaaaaaaaaaaaatcatacaaacccattctgaaaccccaagaagtcctggaatacagaaatgccctcctccttcactatttcacaggaagcactgcaggctatttgcttaatattgtcctgggattacattctaaaattagtaactggttacagctcggttgtagtgcacaattaaaatcacactaacttcatctgaagtgtcattctacagttttatttacacaaccagtgaagggcatgttctagaataccagctttaatccttttcaaacattaatataagaagccaaattgtaatgatacagcaaantgaggccactggtattaatacaggtagcaaaggtccacatccaggtggt

SEQ ID NO: 544 - DNA, 472 bp, Homo sapiens
caatcatttataatagaaacaccttgaccacaagcccttgattgaacattttataatatttcatctacttattaaaacaaataatttcccttgggttggaggggaggtgatttcataaattaattagaaagccatctttagcatattgcttatgtctggatccatgtttctgaggaaaaagacattctcaggtgatgtatttttttcatgcattagtatgcatttttaaaaaataatgcatgtttctttaataattaattttcatcttctataagatgccatgtgaagaagttgtggaaatgtagaataaaaagctaaagctgccaaatttctgttgaactcttaaaaacagctcatgtttgtttgtcctctcgggttgtggcctagcctatttgcaatgtaatgaagctgcagggttcttgtatagctaaagcgttcaatgcatttcacgtgctgtggtggatgtgggtgc

SEQ ID NO: 545 - DNA, 281 bp, Homo sapiens
  misc_feature 180: n = A,T,C or G
acttaagcatttccacttttggaagaaaagtgtattagtattttatattgcatttcatttaaaaggacagttttttttttttttgtaaatccattcattgaaatggtttctaaactgtataatgtaatttggagcctatttagtaatatgaattaaatgtcctatgtagtgctacaattntygaattagaaagtgatcaaatgtmasaaaaaaattyaaaaattcagcccagaaaacaaaatagggtattaaattagtttaatgtaaaaggaattwataag

SEQ ID NO: 546 - DNA, 423 bp, Homo sapiens
tcgaggtactgagacagaagattgtgtctacataagcacaagttgtaacatttcacaacttctaaaaggaatgtcaacaattacaacgatcatgcataccatggtcgataatcacattttagaagcattttcaaccatttctaaagaaatgcttataacattgttatatatagaactactttcaataaactgcaaaacattgatcgacttttccagtatgagctacagtgtcaacacaaaagggaggcataaatgtttaatttatgaaatcagaatggaatatttactgtaaagaaaaattaaaaagctttcaaataaaggccattatcgaaccaacgtgaagagcacaactcgaacttttgagttcattcatcttttaaagctgtcctctcaataacttcagttctaagcactgaattcagt

SEQ ID NO: 547 - DNA, 399 bp, Homo sapiens
gaggtcttttagcaggtctcaaaagttttcttctaataraywtcttggtgttctatcattcgtaggtgttgaatttaccaaactttttctatttcaattattacatttttactttgttcaagtaatattgtatcatattaaatgaacattgcattgtgaaaataccctgcttagtcatggtatgtaatcatccttatacctttttgtattctttttttaaatatttctgagaatttctgtgtctaaatttaaataggatgttgttttgtaatcatcttgtgattcttttgtctcctttgggtattattggccaatagatgaattaagaaatgttacctcttctactgcttgaagtttttgtgagaaattgatgtttttcattaagtgttgatgaaatgt

SEQ ID NO: 548 - DNA, 246 bp, Homo sapiens
aaatgcattataaatgtttttaattgtgttctgttttttgcagtctttaagtgccatgccaattgttcttatattctatagaagttcgctcaaaatactcaacaggggaataggcagcggacagtcagaatggttggaattttggctttctaagaaaaactttattttgcataagcatgtggtcagatcattttgtgcatatgcagcctggattggatgttaagtaaatgcttgttcagtgccggt

SEQ ID NO: 549 - DNA, 413 bp, Homo sapiens
acaaactggtattttatactgttccaatgccagtaatcaatttattttcttcattaaaataatatacacagaatgtattgttagttcgattccttcaaattttatacatatttactttctgttaaagagaaaaggataaaatggtataaaaaaagataaagctattaattaagcacgagagagaagataaatggatattttccctgtgtgaggctaagacagaagcaaatctcgttaagaaaaatgccacccacacaacaggaaatttatccaaaacaaaacaaaagcagttatagaaccccttctctaccatcagaagtaatttcacagcaataaacttattggttacaacagacatacttgaacagttaaggatgggaagaaaggcttaagatatcaccaaattaaaccgt

SEQ ID NO: 550 - DNA, 215 bp, Homo sapiens
acataaggttcaaagtttcctttcctttttttatttattttatattttgcaatgttttttttccataatatttaagtttttcgatgtttagatatttttcttcggtgaagcacaagtwtcttttcatggyccctgakcaattttaaacagttggaacaccggtggcactgataactgctytctgggcagcctctttagcttggggggctbgtagg

SEQ ID NO: 551 - DNA, 175 bp, Homo sapiens
  misc_feature 154: n = A,T,C or G
ggcggaggagcggtaactaccccggctgcgcacagctcggcgctccttcccgctccctcacacaccggcctcagcccgcaccggcagtasaagatggtgaaagaaacaacttactacgatgttttgggggtyaaacccaatgctactcatgaanaattgaaaaaygcttatmmga

SEQ ID NO: 552 - DNA, 298 bp, Homo sapiens
acagtgtatactatccccaccaaaggaaaaaaacattaagagcaaaacaaggggtggggggtgggaatattgctaaagaaaattctaataagagttatctataattatagcttttatttattatatcttcattcaatcatttattcacaattagtctaattgcattcttgatgaataactgacttcagcaaaggagtcaatccactaagcaaagttcatttatttttcatgatgttcttctttcgatcttgagtctttactctcctggattcccaagagaactgcattagcctctagt

SEQ ID NO: 553 - DNA, 437 bp, Homo sapiens
yacaatggcttaagcaaatcgctttagttttttttctatttaagatttaggacagactactcgtctaaaattcactatttacagagaaggtcctagggaacaggataacttatttaggtttagctctcataatacaatatccataatggctttagaagaatgtaaataaataacattggtaaacagcgtatactgatattttctgacaaactcatttatctaacatcatgctgagcaatcaagaggattcctctatatattttaaattttaatttattctatttcctgattcacaaactcttgctccatgttaaagcagttatcaccaatagaacctatgagaaccagtgcccatggaaacctaacagcttgtttttttaatcccctattaaaactcggttgaacttgatatatgcatggttgaaatatgcgtgggt

SEQ ID NO: 554 - DNA, 575 bp, Homo sapiens
ycgaggtacttttgacaacatttatctgcatgtccagatcagcaatgagtcggcaattgacttctacaggaagtttggctttgagattattgagacaaagaagaactactataagaggatagagcccgcagatgctcatgtgctgcagaaaaacctcaaagttccttctggtcagaatgcagatgtgcaaaagacagacaactgaacaaattacaaatgaactttcttgcacttgcttgtcgccaaataaaagagaggcccattgattcctcccccaccccaacacttttcttttaaagcttttctccctccttgttcttgtttttctttcttcctttccttttctctgagagttttaatactttcaaggactttaaaaaaataatcatgtttgaattgttttctcttatttttgtgaggtggtttgaaggaaggacaaggtagatctgtttagttttgcagttgaagttagatggtcctaaacatttaattgtcaaataatttcaaatttaatgtcctgctttcacattgaagggcagagcctacaaaacattgtatatttcaaaagacaaaaa

SEQ ID NO: 555 - DNA, 226 bp, Homo sapiens
accgaaccatgaccacccctggcaagagccttcatgcacctagcaagtagtcacagcatgcatgtgcctagaattgttacgtggtcaaattatattattgtgtattcccaccaacagtatgagaaggtccacttctccatacctccacaactctgggcatctaaaacttttaaaatcctggaatcataggcaaaaaaaaaaaaattcacccatattttcctctagt

SEQ ID NO: 556 - DNA, 298 bp, Homo sapiens
acttcatataagtggaatcatatagtatttgtccttttctgtctggcttatttcacatataatgtcttccaggttcatcatattgtagcacatgtcagaatttcattcctttttaaggctgaataatattccattatgtgtataccacattttgtttatccattcatccatcaatagacatttgggtatttccaggacaatatattcttaatttaatcccacattttaagacttacaggtaatttaaattcaattcaacttactgagtatttactaagggtaactcactatgggaagt

SEQ ID NO: 557 - DNA, 166 bp, Homo sapiens
actaatggtctacatccgattcaaaaccacatagttcattgatcacagatgcatggtattagtcacgaaagtttcagaacacattgtgttgattttgaaaggtcatttgcatcttctatgatttcaactttatctccatttaacttgcttgtaaagtatgtatgat

SEQ ID NO: 558 - DNA, 461 bp, Homo sapiens
  misc_feature 448: n = A,T,C or G
actccctgttttgagaaactttcttgaagaacaccatagcatgctggttgtagttggtgctcaccactcggacgaggtaactcgttaatccagggtaactcttaatgttacccagcgtgaactcgccgggctggcaacctggaacaaaagtcctgatccagtagtcacacttctttttcctaaacaggacggaggtgacattgtagctcttgtcttctttcagctcatagatggtggcatacatcttttgcgggtctttgtcttctctgagaattgcattccctgccaggcctaccacataccacttcccctggaattggttgtcctggaagttctgctgcagagggaccttgctcagaggtggggctgggatcaggtctgaggtggagtcctgggcctgggcatgcagagcccccaacagggctaggcccagccacaggagacctangggcatgatttca

SEQ ID NO: 559 - DNA, 193 bp, Homo sapiens
accagacagaatcaggaaaaaaaaattgaaaataagcataacactataaagaaaacttggaaaagtgaaacacttctaaataaaaaatatacacctggcctggcacccattacatatatacataatacatgttataaacatatatacagtaaatgttttggtagcaatacagaccatgcattggtctttgtgt

SEQ ID NO: 560 - DNA, 125 bp, Homo sapiens
acacaattattctcactctccacagaaaggctgcttaacttctcatctggwggwggsaagcactaaaatcctgattttaacagaatagtagkaaaaatgcctcagtgatttaagttgaaagcagt

SEQ ID NO: 561 - DNA, 325 bp, Homo sapiens
ccgaggtaccacggcctcagagtcacagctttgtgacattagggggcaatctccagctttacgttttagaagacagtttgttttttgatgtatatttttaatatccccagattaaagaaaactcagggcaagtaacacactaaaagggcctttacaatttttttcttgctgttattttgagatgcatctgttgcaaaatatgtcaatgttagaaatcaagctccttcatatagggatagatcatttgaaatagatttctctcaagaataatccaattattactttttagtgtttgcataaattcactccagaagtcatccacagt

SEQ ID NO: 562 - DNA, 303 bp, Homo sapiens
accagatggaaatgatatttgcttcactccattttgaatttctgcctgaattagctcttgtttcagttcttcaatttctttcttcagtttagcattttcaactcgaagtttcttctcttccctcaaagttgcctgcaaaattgctttctccttaagtagagaaacttgctgcttaagatattcaatgatttgatctgcctctgcacccttctgctccagtctcttcagaacagcatcattatttgccatttttgccaagagacggcagaaaatcatgaagcggaggaccacgggttccgagac

SEQ ID NO: 563 - DNA, 279 bp, Homo sapiens
tcgaggtacacagtcattgaagactctccggaattcagatttgaaaccatatattatcttcattgcacccccttcacaagaaagacttcgggcattattggccaaagaaggcaagaatccaaagcctgaagagttgagagaaatcattgagaagacaagagagatggagcagaacaatggccactactttgatacggcaattgtgaattccgatcttgataaagcctatcaggaattgcttaggttaattaacaaacttgatactgaacctcagtgggt

SEQ ID NO: 564 - DNA, 427 bp, Homo sapiens
ccgaggtactgtgtagtggtatcagtgttaaaaatggaagatcattatgaagaaacaatttgtcatttgggtatatctgtttctataggacaaggatttgtgtctaaatattccttacttgtatctcagaggactatctgttaaataattgatcttaatgccagcataagaaatcaagggaactatttctcagacatttctttctctaaattaagtagggtttcaggttccaagtttacattgagagaactatgttacctgggagagaatgtaaatttttctaattcccaaacaaaaccactaatttctaggaaacatttattgtttatatgcagatcctagagacttctatttcagtgcggatcaacaacttcaaaaatatacagcctcctatttatttacaataatatttacatacaaatgaagt

SEQ ID NO: 565 - DNA, 214 bp, Homo sapiens
tcgaggtactgggtcttttccagccaggcctgcaacggtgaccttaatcccagctcgcctcatgacatctacagggatgaccgtctccatttcctctgctcctttagccaggatgaccagagctcttttggaagccatttttatgttatatgtttacaagccccacaccaggctgaaaatgaacgcacgccagcacgcacgcgcgccgtccggc

SEQ ID NO: 566 - DNA, 382 bp, Homo sapiens
ccgaggtacttttagttttttcacataactctctaaaggccttttcaaaaagtctctttcactggcatcatctactagaacaatttcttctatcatgtgtcttggtgagcgattaatgacactatggacagttcgcagaagtgtgctccaagcctcattgtggaaaacaatcaccacacttgttgtaggaagattatctggatacacctttgttttacacccttctaacctaacatctggtaaagatctgttgagtgcaatcatctcacttgccattaaattgaactgattgattttaaacatctctttcatcttttcttgatcctctttaggaatgacgactggtttccccatttctccaggaccttcatgaggcttttgt

SEQ ID NO: 567 - DNA, 271 bp, Homo sapiens
  misc_feature 168: n = A,T,C or G
cgaggtacaattacccaccactggaggtgactcagagaggacccccagagggtgtctccatcttccctatttattttcagcccttgagggcttcattgtagatcaaagccaaggcccccaggaaggtgacatactcctggaagttcacctcctggtccttgttccggnccaagtcttccatcagccttgcaatttcagcatcctgcagcttcgagccaatggtgagctccttctggatcagctccttcagctccttcttgctcagggtgtg

SEQ ID NO: 568 - DNA, 340 bp, Homo sapiens
  misc_feature 326: n = A,T,C or G
cgaggtgcagtgtatattcctttgttgtgaatccaaatctttttcataggtaatgacagatgccttaatgtgaagcttatttataatagcaataaacctaactggatttggatgaagaagtcttaatactgacatactggatttttaatgcactggtttgttatttggtattctatctctttttccaggcctccaggttgcacatttatttattatgttcaatactttggttcttagttcttaaagaatcaagaagttgtgtaatcttttaaaaatattatcttgcagataaagaaaaaaattaagagtgtgtttacaactgtttnctcttttttacagt

SEQ ID NO: 569 - DNA, 156 bp, Homo sapiens
gccaggtaaaccaagacttggtctcagtgaagaaattccagaggtcaccggcaaagaagttcccttctcatcatcttcatctcagctattaaagatatatacagttgtacagtttgctctgatgttggcattttatgaagagacctttgcagatac

SEQ ID NO: 570 - DNA, 216 bp, Homo sapiens
  misc_feature 176: n = A,T,C or G
acagtactcagtatatctgagataaactctataatgttttggataaaaataacattccaatcactattgtatatatgtgcatgtattttttaaattaaagatgtctagttgctttttataagaccaagaaggagaaaatccgacaacctggaaagaattttggtttcactgcttgnatgatggttcccattcataccctataaatctctaacaaga

SEQ ID NO: 571 - DNA, 163 bp, Homo sapiens
tcgaggttttgtaatccaaggttctgactaaaagcaaaaatacacggcatagattgcaacagcaaagaagtgtccaattaaaactagagggttaggagacaatacagaaagcagcccaacaggacccgcaacacattcgccaccaagttttgaaataaagaaa

SEQ ID NO: 572 - DNA, 156 bp, Homo sapiens
gccaacgtgcagcggctgaaggagtaccgctccaaactcatcctcttccccaggaagccctcggcccccaagaagggagacagttctgctgaagaactgaaactggccacccagctgaccggaccggtcatgcccgtccggaacgtctattagaag

SEQ ID NO: 573 - DNA, 414 bp, Homo sapiens
ctggagccgctgtggttgctgtccgcggagtggaagcgcgtgcttttgtttgtgtccctggccatggcgctgcagctctcccgggagcagggaatcaccctgcgcgggagcgccgaaatcgtggccgagttcttctcattcggcatcaacagcattttatatcagcgtggcatatatccatctgaaacctttactcgagtgcagaaatacggactcaccttgcttgtaactactgatcttgagctcataaaatacctaaataatgtggtggaacaattgaaagattggttatacaagtgttcagttcagaaactggttgtagttatctcaaatattgaaagtggtgaggtcctggaaagatggcagtttgatattgagtgtgacaagactgcaaaagatgacagtgcacccaga

SEQ ID NO: 574 - DNA, 414 bp, Homo sapiens; identical to SEQ ID NO: 573

SEQ ID NO: 575 - DNA, 417 bp, Homo sapiens
  misc_feature 383: n = A,T,C or G
tggtatgggtcatataggttcggtacaacatgaagccatggtcctgggtatggaagaatgagtacttcagacaaacagaaataaaagaggacactgtgactatagccaaggaacttttgcgtatagctgttaagggaggttgtcatctccaccagatgtgggtttatgccttacctgcttgacagcctcaaaggtcattggcaagattgaatgaatgggcccacgggggcaaagcaagtctaggaaagccagtaaatgcccaacctattagaataagggagaagaattagaatatcagggaagtttctggatagaggacaagaaagaataggctatttagaaaaaaaaaggtgtggtcccattattttcaggcttcaccctanatgacacatgagcaaaagcccacttcgccatcat

SEQ ID NO: 576 - DNA, 245 bp, Homo sapiens
ggaaggggggaccctgccaaagatgaggctccagctgccctggggggagggtggtggccattactagagggggcctgggtcctctccccaggggctgccagcatccaggccaggaagcctggagccaagaaccttctggctctgagggagcaagagctggcaggcggcagggctggcacagacagacggaagcagaaaggacagtttggctgctgtgtctgctgcgcacgccccctccccggaca

SEQ ID NO: 577 - DNA, 418 bp, Homo sapiens
gaaaaccctttaatgttgggctttctttaaataaaacagaaaggttgcagctttcccatggtggctgtaaggcaagaacagcagtgagggcgggcgtgttctatcgggcagtgctgcagcccttgactctggctcaaggtgggcttcctggaggcagcggcaaggaggcagttctggatgtgcaggcacagatgtaggggaacaggcaagcgggcacagggccctgagctgacaagcagtgacccctgcacccagctagatggggcaccccctctctgggagctgagggcatcagctggagcctcaggctgggaccagccccaactttgccttggtgactctgggccattccaggcctcagtttccccactgtaaggtgaggcattaggcaggagggggtggccccagccagtgtcct

SEQ ID NO: 578 - DNA, 363 bp, Homo sapiens
  misc_feature 153: n = A,T,C or G
aaagcccagaaggcactttattggaggtctctgcctccattcacaggagaaaggagctgggagccccatcctagggtcccagcatcagcccactggagggcctggaacagtccagcactctgtgggagaggagtggggaggggaatgttttanaaaaaatagatctctatgtacatctgacatatttatatagcacataaattagggagtgctctgacccctgcccgtggagcccaagcactgagcagggaggtgaacgccagtccagaaagaaggtgctggagcccctgctctgttctctccatcacggggctcccctagggcctccccaggcctccttggctcagtccaggtttgtctgca

SEQ ID NO: 579 - DNA, 403 bp, Homo sapiens
ggaataatcagctcttctggcccacaagtaggaatgatcaatgagaacttaacttagtcctttatttggggattttttcatcaaacaaaaatttcttgaattggggagaccacttccctgtaactccagtattgccccctctcactttagcatatattaattagcaggttgggctagagaaatcagctgctatgcgggttgattattattattatttctaatccttttccttatttgccttctactccccttaatctaatctaaaagctctgttccatgcaactggagttccttatccctctcttccccttcccttatatattgaggctatggggtaggagaaaagtgcacaacccaccaccccctttactcgtgcattaaaatttcttatttacccttttcc

SEQ ID NO: 580 - DNA, 403 bp, Homo sapiens; identical to SEQ ID NO: 579

SEQ ID NO: 581 - DNA, 432 bp, Homo sapiens
acctgataaaagttaataatctcttgttaggaaagctgtccattaataaggccagtcttcagcaaaactaaaaccattttgttcgtttagctttcctagtctgacaacgcaatactgttgaaccacagtcaaatataatgacaacattggatggatagatcagtaccattggttacagctgttaaacaggttcgttcttggcgccacataaaaacaagccaataacatcgaataaatcatggctttttttttctttatcacaattcacttaagtgatgttaattatggtccttgtcaaacacgtttggtaaaggctatttacagtgtacatggctgagcatgcactatttatagttacaaagatacctgccagtttattacaatagaatacacagtgctgaaatggtgaactctcccatcttaatatatatt

SEQ ID NO: 582 - DNA, 215 bp, Homo sapiens
  misc_feature 121, 131, 142, 144, 147, 156, 160, 174, 178, 184, 194, 206: n = A,T,C or G
gtttatttcagctttacttaaaattttagtttcaaatgaaatgaaatgtgacactgaagcataagaacacaactgaagactgcaaacaacctaattcattttcccaggttgcttaagcctncaagcaccantcaaatatcgnantcnattaaaagnaggnctttcccatttgtngccngcttcngaatggaacntatttaaaaccntcaatttct

SEQ ID NO: 583 - DNA, 426 bp, Homo sapiens
  misc_feature 408: n = A,T,C or G
tgggcgcctgtgggactgggtgcctctggcgtgcagaagcttctctcttggtgtgcctagattgatcggtataaggctcactctcccgccccccaaagtggttgatcgttggaacgagaaaagggccatgttcggagtgtatgacaacatcgggatcctgggaaactttgaaaagcaccccaaagaactgatcagggggcccatatggcttcgaggttggaaagggaatgaattgcaacgttgtatccgaaagaggaaaatggttggaagtagaatgttcgctgatgacctgcacaaccttaataaacgcatccgctatctctacaaacactttaaccgacatgggaagtttcgatagaagagaaagctgagaacttcggaaaaggctcatctgtcaccctggagaanggaaactgtacttttccc

SEQ ID NO: 584 - DNA, 431 bp, Homo sapiens
cactgttgctgttttcagatacaccagaagagggcatcagatctcattatgggtggttgtgagccaccatgtggttgctgggatttgaactcaggaccttcggaagaacagtcagtgctcttaaccactgagccatctctccagcccagatttccttttgatggtgaagcattttaattttaccattttgctttgaaagggcactgctctatgttctggcactatcggtattctggactcctcttcgtaaaacatttctttataacaaaaggtgcacttacttttatttcggtgtgtgttttgcctgcatgaacgacttgacatctcaagcctacctggtgtctggagaggcccgaacaggatgtcagatgccctagaactagagataccgaccgttgtgcgctaccatctgggtgctgggaattgaacta

SEQ ID NO: 585 - DNA, 412 bp, Homo sapiens
aagagagaaagagaacatttttataccaaggagggattgactttcagaaaagagtagacttctctctcctcccttcctccaaaaaaagaagttggaaaccttctgtttttgtgtgtgtgtttttggttgttctttgtttgtttttgtttttgagatggagtctcactctgtcacccacgctactgcagtcagcctgggtgacagagtaagattctgtctcaaaagaaaaaaaaagacagaaaagaaatggactctgatggaaaagatgtgtacaaggctgattatactaagcagagggatatttaaataaatgctaagaagagaggcaggtgaagctccaggggagccatccttcccaaatgttcacttaaattttcagcggtttgggtatgccagatggtgaacctaggta

SEQ ID NO: 586 - DNA, 431 bp, Homo sapiens
aagaaaagggagccaagaagaaagtggttgatccattttctaagaaagattggtatgatgtgaaagcacctgctatgttcaatataagaaatattggaaagacgctcgtcaccaggacccaaggaaccaaaattgcatctgatggtctcaagggtcgtgtgtttgaagtgagtcttgctgatttgcagaatgatgaagttgcatttagaaaattcaagctgattactgaagatgttcagggtaaaaactgcctgactaacttccatggcatggatcttacccgtgacaaaatgtgttccatggtcaaaaaatggcagacaatgattgaagctcacgttgatgtcaagactaccgatggttacttgcttcgtctgttctgtgttggttttactaaaaaacgcaacaatcagatacggaagacctcttatgct

SEQ ID NO: 587 - DNA, 132 bp, Homo sapiens
  misc_feature 90, 128: n = A,T,C or G
aactttcccatggtcaaaggaaaaacaagcaggagttgagtggctggggtggggtgcaggcaatggagagagggcataagggtgtagaanctgaagggggctagaagcttactcctgagcttcttacntccg

SEQ ID NO: 588 - DNA, 425 bp, Homo sapiens
  misc_feature 13, 32, 47, 53, 56, 70, 72, 102, 128, 129, 165, 190, 420: n = A,T,C or G
gggcttcttcaangaacctcagctgaaacctntgggggattactganttgatntgnccaccagaacaggngngctcgcttttgttctgaaatcaaatcctcnaaagaccgggagaaggggtcacccanncgtggatcgttggcattgtgggaaaagggaaaccgnaacggcccggatcattgacaagccncgaagttattgaagtcctgcctcgtggggccacagctgcttgttcttgctcctgacagttcaaatgcctcctttgagcctagctcgtgagatgaaagaacagaagttgtttggaccttagagccattatccacaatcacggatggttctcaagagttgattgtaagaaatttccaaagaaggctgcctgcatagtggttccggctgccctttctaggtgattggaatcancccat

SEQ ID NO: 589 - DNA, 425 bp, Homo sapiens
caacagttattttattaggatgtcagccctgggtccagagtgagagatagggacaggggacagcccagcgaggctgggtcgggggtcactccaggatgttccaaccacaggggcagcatctcctccactccacatgctggccaagggcacagagctgccgtatcgcctgccaagggggtggctcaatgctgctgccctggtcctgtatgggcccggggtgccgagaacagacagcaagcctcaggcgccggtcctttgagctttcttgatttcctcagagagcgcctccttcagctctgcgtaggcctggtccaggctgtcgttaatgatgaccacatcaaacaggccgggctccttgctgctctccatgtcggcctgggcagcagccagccgcttcaccaggctctcctcggtttcagtgttgc

SEQ ID NO: 590 - DNA, 425 bp, Homo sapiens
acaagtatacatataatctagataagggctgtaatgtttcctaatattaattactgtacttaaaaatttacaggacatgaacataaataaagctgtttaaaactggcaaacgtagtaatagtctgtcattcagtacaaggtatatttatgttatttccaaagccatcaccctaaaatcctaagttgccactcttaaaacctaaaaataatgtcgaaaactaaagtcataaatacatgtatacatacatttgcatatttacacttatgcagaaatcatcaatatactagagcccagctttaacactgtccttcagtttcacacagaaggacccctaataactgtaaatatataaatatgtcaggttaaagggaaaaggtgttcagggcacttcttgtcctctctgtcccataacctacctccaccc

SEQ ID NO: 591 - DNA, 425 bp, Homo sapiens
aagtatgtatgtacaagactcaagtaaatagaaaggcagctttcaatcacaaatcagtttttcagattttactgtggaagcatatttaatgcacacatttgaatgttacacataaataattttaacgatggagtccaagttctggattttacattagatctgcatatataagacacttgtggtcaaatttcaagattggtaaagccagtttcaagctgcttatattttgagtacaggtttcactattacaaatatatgatgttaaactaacaaactcatgaccttcaaagatgtcttcgtcccacgcacacacatttgtaatttgtgtccatttgctatttcccttcttctataatcttcaaattatatagttatgcattgagttccctatgcatctcacccatctcctttatctcagccttctc

SEQ ID NO: 592 - DNA, 299 bp, Homo sapiens
agtgaaaatgggttggtttttgtcttcgacgctcagggtctgggcgcctcgcatttgcagtctgttgtgacagacacggggagctccgcgtgccagcctgtggctgccctgctgtgggggtcctggggccggcgaggccccttcagtcttgttctggggggacggcccactccggggagggggtgtgctgtgctgagcgctgtatccctgaatatagtttattttttctacatttgaattctgttgtagatttatgtaaaaatacattctttttgaaaataaaaattttcatgtcttct

SEQ ID NO: 593 - DNA, 425 bp, Homo sapiens
tttttttttctttttcccaggaggcggcgacggcggcggcggggggagaggaagagaaagaagcgtctccagctgaagccaatgcagccctccggctctccgcgaagaagttccctgccccgatgagcccccgccgtgcgtccccgactatccccaggcgggcgtggggcaccgggcccagcgccgacgatcgctgccgttttgcccttgggagtaggatgtggtgaaaggatggggcttctcccttacggggctcacaatggccagaaaagattccgtgaagtgtctgcgctgcctgctctacgccctcaatctgctcttttggaatcatcacattccacttctaaaaggagctttaaagatggcctggttgaacgtccttcctttgtgagtgaggaaattaagtgcagattaagtgacttgcc

SEQ ID NO: 594 - DNA, 425 bp, Homo sapiens
gtcactagctggctaaggcttaaagcagagacgtgtgactgggtctctcgggagggcctctggttcttcccgggctcaggcttgctgggggctgggggccagggctctggcgacctagaggtgtggacggcacagctgcaggaggccttctcttaaccctccgagagtgggactgggagatttcctctgaagtcccaaagaggccctgtgcccaggggacctcctcctcggcctcccaggtgggtggtgcaagctggttcttggccatgctccaggctcgggtgggcacaggcgtccactccagtgtgctgcgtgcttgtgagactgcctgttctgggaccagcccctgggctcttccaccaagatttggtgagggtccccctctgcctctcacagaagcccctggccctggactgtcctggggg

SEQ ID NO: 595 - DNA, 162 bp, Homo sapiens
  misc_feature 43, 102, 126, 154, 158, 160: n = A,T,C or G
ctttacattattttttttccaaaaagactagtatttatacaangggcaatagaaacaaaaacaaaaacccttccgactgccacctggaaggggctggctggnctgctccctctcccacctggaacnggggggggcactgggcaggagggaatgnggangngg

SEQ ID NO: 596 - DNA, 283 bp, Homo sapiens
  misc_feature 17, 106, 111, 115, 120, 127, 131, 144, 150, 153, 155, 160,166, 171, 176, 182, 201, 203, 205, 212, 220, 221, 224, 232,239, 242, 259: n = A,T,C or G
aaggtgactcaacaccntcttcctcaaggacttcttggtgatactctcttgtcttttccagttaccctcttcctcctttgtcctctgtgcttgggctcacaacttnatggnctgnacttnataaaanaacnatggcaactttgncctgantgncnccctncccaanctganctggntggaanaagaaacttggaaactatntnanccatggntttgggannctncccccttncccatgnctnctaataaaaccatgcantgcctttggagagaagagaccccc

SEQ ID NO: 597 - DNA, 426 bp, Homo sapiens
  misc_feature 41, 43, 46, 197, 200, 207, 211, 217, 255, 277, 287, 293,297, 304, 318, 327, 333, 355, 357, 359, 375, 379, 380, 394,405, 407, 409: n = A,T,C or G
gaaatacaaatgtggattctcatcactgaaaaatctttgangntgngtttattcctttcatcattttttaaatattttttttactgcctatgggctgtgatgtatatagaagttgtacattaaacataccctcatttttttcttttcttttttttttttttttttagcccaaagttttagtttctttttcatgatgnggnacctccnaagngatggnagatttaaataattttttatttttattttatatatttnttcattagggccttttctcccnaaaacgaaanaaaaantccnaaaaacnaaacccaaaaaaanagagggtantgtccnagtttctgtatgtataaagtcntncncgatttcaggagagcnctgnncccaatttgctccntgaatcaaggngngnaaatggtttttttggcg

SEQ ID NO: 598 - DNA, 412 bp, Homo sapiens
  misc_feature 241, 262, 300, 309, 312, 318, 327, 329, 385, 390, 399, 402: n = A,T,C or G
tttttttttttttttttttgccacctagagatgataatttattgttttaccatgactcagaagagaaacaacataaagagaatatttcaaatccccacaatttccttctcaacctcactactcttaacatttctttatcagacgccactggcttcctaaaatggaccctggactatgtatggggaccacattcattatgctgcctttcctcttatgattaaaactttagccctcattcganggttccaatggtacttttagnggaggagtccctagcttttaaaaaaaccacttttcctntaaaatccnttntttatngaaaaaaancntttttaaaaatgttaaggaggattttaaatgaccatattcaattaaaaaaaaaatnccttntggaacatnttngcagaaacct

SEQ ID NO: 599 - DNA, 415 bp, Homo sapiens
ccaagatgacaaagaaaagaaggaacaatggtcgtgccaaaaagggccgcggccacgtgcagcctattcgctgcactaactgtgcccgatgcgtgcccaaggacaaggccattaagaaattcgtcattcgaaacatagtggaggccgcagcagtcagggacatttctgaagcgagcgtcttcgatgcctatgtgcttcccaagctgtatgtgaagctacattactgtgtgagttgtgcaattcacagcaaagtagtcaggaatcgatctcgtgaagcccgcaaggaccgaacacccccaccccgatttagacctgcgggtgctgccccacgtcccccaccaaagcccatgtaaggagctgagttcttaaagactgaagacaggctattctctggagaaaaataaaatggaaattg

SEQ ID NO: 600 - DNA, 208 bp, Homo sapiens
  misc_feature 45, 66: n = A,T,C or G
aaaccgccttttttttttttttttttttaatatgcagtttgtaanaacaaaactggatggcatcanaattgtctggaagttttgtcttgggcagtatgggctgggccaaatgaaatgatttttataattctaaacaggttaccaaatgaaatgtcatggctttactttggcaattaaaggggggaatttttttaaaaaaaaaaaaaaa

SEQ ID NO: 601 - DNA, 165 bp, Homo sapiens
  misc_feature 19: n = A,T,C or G
tgcaggtcgacactagtgnatccaaagaaagtaacctaaacttgacctgcttaatacattctagggcagagaacccaggatgggacactaaaaaaatgtgtttatttcattatctgcttggatttatttgtgtttttgtaacacaaaaaataaatgttttgatat

SEQ ID NO: 602 - DNA, 416 bp, Homo sapiens
aaaacggttttgccgagttgggacgtccactgctgtcaagtcaaccagagatttgaactgtgcattggtgtgatccctgaggaaagtcagcactgggatgacgccatcaggatggatacagacctctaactcattgaagcaggacacctgaacttgttggacatacttgggcaagatttcagccacatactctccaaaagctgagagctgcttgtgggccacatcattccgtggtctgacagtggggcgcgtgtcggccccggcgctctcccgcctcaccggcagcaacagaacggagggtcgcccagtccccctggtcagcgccgaggcccccaagatcccgcgccaccacagcctggctaccgccgccgcgagtacttctagagcggccgcgggcccatcgattttccacccgg

SEQ ID NO: 603 - DNA, 416 bp, Homo sapiens
  misc_feature 31, 99, 174, 242, 249, 331, 415: n = A,T,C or G
catgagcataaaaaaaaaacccaaacctgtnccatacccctcccactcatgcaaacagctcttaaaatgaagaattctttcaaaattttacgttttttncattcttggctcaattcttttgctttcctcatcatcagaattcaaactttgggcaaacatgggttttgggctgantctttggaatatgctggaaaaaccccaatatgggctgcttctgcttgtttggcatgacgcaaaatggnttcccangatactgcatcgtcttgccaagaatgttccattagaaaaaggcccgggtcctcgccacactggctggcctctgctgggtgcntctagagtatatcggctgcacctcagtgcatctgtccataatttttttgaaaaaaaaaactcaatcttaacgcgggcatattcnc

SEQ ID NO: 604 - DNA, 414 bp, Homo sapiens
  misc_feature 291, 359, 367, 369, 371, 374, 381, 383, 387, 400: n = A,T,C or G
aaaatttatgagctttattaaagcggtttatcacaaagatggaaacgtacaaatgagaagcatgcaaccatcatcttccacagtcaagtcaaactgctatttctctctctctcctgtttcatagagctggaaactgcaggtgttatacccaacctattcatcctcaacactgtagtcacgccccggaaactactcagggcaccaaacatccaaaacataaactattattatacaaagaaagtgcaaagttaaaaaagaaaacatggagacccctcccccccataccctcanctaaaggctaacaatggcacttgggctcttgcttaatctagattgtcttcaaaaagtctctaaaatgngatactgngngnggnggggggngngaanggtccaaaagctncttagtgtttgaaa

SEQ ID NO: 605 - DNA, 417 bp, Homo sapiens
tcctctttcacaatcactcaacaaacaggtcacacatcccctaggtccacgaactcatcttctcgtttggccaaatcgtcttcatctcccaaagctttccagccactggtgggtaagacgggcttagaggaatgtcgctggagcagagcgaaaggaaacaaagacgagaggcgggcagagttcctcagcaggcagggggcctcagcctggggggcctgctggctgtggtgtctctcgtcgatcttctcttgtaaactctggacttcctccatcatttccaagagtttgctcagagtggccacttggccaccacctaggatttgggcttctggaatccaacgtaggtagcgctgggcccagactttgatttcgggcccctcgatatgcggtaacaacaaaccatggtagtcagtggac

SEQ ID NO: 606 - DNA, 413 bp, Homo sapiens
ctgaattctttaatttaaaaaaatcatacctaggaggtgtgctataggaattcagatacaataagttgcatataaaacccgacctcattgctcattgtggtaaagcaaggatgatgagaaaatgcacctcaggagcaaaaacacgctttacgggcactccgggacccaagtcccgagacatttccacgtgaccttctggaaagacacaccgcccacctgactgcacgacgggactggtccagcctcccggctcctcaggaaggagatgagtttcctacaaagtgagtggccacagctccaggacagggcgtccacatgtcgttgtgggtctggctggattttgaggtgccgaggaactggtcggtgtcctgatcgtattgtacgtggtgctctcgatctcccaactgccataa

SEQ ID NO: 607 - DNA, 414 bp, Homo sapiens
  misc_feature 376, 384: n = A,T,C or G
attttcattaaaactgtcagaatttgcttactataattatgatacagtccaaagaatgcagtcactttttatcatgttaactaattgttctcttttgaagatctatggttgactaattaaacaataattcaagtagagtgtcccagaaaaaaaccacttgggctccctgtttggagtctggctggctctgagcattgccaatggcccctactcacctgactttgtatcctctccttttagaggctttgcattctgcacccagcttcactaacagtgggctgaaaacatccttgggttgagtgtttcatttgggagttatttggccagggccttttgaacagtaagtgtccccatgaagtgctagataatatatggngtaaagangtcagctttttttttttttttaactctaac

SEQ ID NO: 608 - DNA, 415 bp, Homo sapiens
  misc_feature 22, 288, 307, 310, 322, 336, 340, 343, 352, 353, 372, 381,395, 408: n = A,T,C or G
gcagtggtctgatcttaagggnctatatatttgcacctcctcattcaacacagggctggaggttctacaacaggaaatcaggcctacagcatcctgtgtatcttgcagttgggatttttaaacatactataaagtctgtgttggtatagtacccttcataaggaaaaaatgaagtaatgcctataagtagcaggcctttgtacctcagtgtgaagagaaatcaagagatgctaaaagctttacaatggaagtggcctcatggatgaatccggggtatgagcccagganaacgtgctgctttttggtnacntatccctttttntcttaagaaagcanggtnctntcttattannaaatatgttaaaaaatggnaagcaaacnacaggtgcctttanaaattaccaattnttaactt

SEQ ID NO: 609 - DNA, 420 bp, Homo sapiens
ggttttaaaattatttcttgaatctctccatacacaggcaaaaataagtgtgttacttaacatactggaaattgcctaacttaatcattgcctaaagaagagaaaattatccccaaaacgtgcttaaccaggaggccaatgcatttgccgacctccaagaacatggagatgaacgtgatagacagactgtccaccatctgaaccttcattcaccaccattcgataacccttattcaggcccagatcagcagcacatttcttgccaacaatcattaagtgtccaagaagactttcatcatcatcttctgccacagaaatctgggatatatgtttcttgggtatcaccagaaaatgtgttggtgcttgaggggaaatgtcatggaaagcaaggcaccggtcatccttaaaaatgattttggc

SEQ ID NO: 610 - DNA, 158 bp, Homo sapiens
  misc_feature 25, 29, 31, 37, 66, 83, 86: n = A,T,C or G
caactttaaaaaaaagggggcggtnaaananccaaanataaaaaggtccctttggtggataaaggnccctttccgggaccggnccnggacccacctttgggcccaaagggggatttaccgggtaaaccaagcctttaaagcgttgggggttaaatttc

SEQ ID NO: 611 - DNA, 159 bp, Homo sapiens
  misc_feature 132, 147, 152, 154: n = A,T,C or G
tcgacactagtggatccaaaggaagatggcggacattcagactgagcgtgcctaccaaaagcagccgaccatctttcaaaacaagaagagggtcctgctgggagaaactggcaaggagaagctcccgcggtnctacaagaacatcgntctgngnttcaa

SEQ ID NO: 612 - DNA, 419 bp, Homo sapiens
gcattttttattaagacatttggggcccgagtttcctctcctcctcccctccatcctgtgctctctaaattcagcttttggaaacctaagtgtgcccaccttccccagcaggtagccagagcctccggggtccctcttccttccttctttctccccagatactgcaagagacacccaagtctgctgtcagcagagggtgaagcgtctggcactgatgttcatgcgcgtgagtcccagatgccgcagcggtggggccagaggcaagccagtcccagactctaactccatctccagctcagcctcatccagaagctcctggtgcaggtgacagacttggtccactttcagtctgtgcagccgggcccgcagcctgagcagctgccctgccagctgccggtcctgagcccgcatctcctgca

SEQ ID NO: 613 - DNA, 419 bp, Homo sapiens
  misc_feature 395: n = A,T,C or G
ccccatactgaggcatataaagtttgcaaaaccaaggggcctgtcttcccaaggtcttactataaaatctgggttaggctaaaacttattatgtagaccagagaggcgttgattttaaaccaatcatcctgtctcatcttcattatttctggctttatgagcagaatgtcctgctacctttggcttcttataaagatctttaatggagtattttaaacattggaaaatccatgagtttgagcttatttggagaatgctgctaagaatgggattgactgacataacttactagcctctttcctgcttgaggtacagcagttttcaatcccaatgtgtaaagtgcttagaagttatcactccccaccttagagcaaaaaccttcagagaacttcagncactccaccaggcaaatagcacct

SEQ ID NO: 614 - DNA, 123 bp, Homo sapiens
  misc_feature 2, 37, 74, 76, 87, 88, 91, 96, 105, 112, 117, 121: n = A,T,C or G
gnggtatggactagaaaacttggaatgactcatgaanaaaccttggaatgacacatgaagcatgatagggaaantnattctgaggcnngangcttnactgaattntttccanccagnggtntt

SEQ ID NO: 615 - DNA, 362 bp, Homo sapiens
gaccttgaggtttcatcgggtgattgcccttgatttcttaggctttggcttcagtgacaaaccgagaccacatcactattccatatttgagcaggccagcatcgtggaagcgcttttgcggcatctggggctccagaaccgcaggatcaaccttctttctcatgactatggagatattgttgctcaggagcttctctacaggtacaagcagaatcgatctggtcggcttaccataaagagtctctgtctgtcaaatggaggtatctttcctgagactcaccgtccactccttctccaaaagctactcaaagatggaggtgtgctgtcacccatcctcacacgactgatgaacttctttgtat

SEQ ID NO: 616 - DNA, 210 bp, Homo sapiens
  misc_feature 156, 181, 194: n = A,T,C or G
tgatgccaccccgtcacccctcccctcctgagcagggatccaagaatgtgccaagagtcccgccagcctcagccaggtgggcctgtatatagggtccatgtgcaatagggagggacgtcttctattttttgctgccccctccccgcccactgtctnggggcagggggagaaggtattttcnagataaagcacangcaccacaaataaaag

SEQ ID NO: 617 - DNA, 511 bp, Homo sapiens
acgagctttcgtggctcactccctttcctctgctgccgctcggtcacgcttgtgcccgaaggaggaaacagtgacagacctggagactgcagttctctatccttcacacagctctttcaccatgcctggatcacttcctttgaatgcagaagcttgctggccaaaagatgtgggaattgttgcccttgagatctattttccttctcaatatgttgatcaagcagagttggaaaaatatgatggtgtagatgctggaaagtataccattggcttgggccaggccaagatgggcttctgcacagatagagaagatattaactctctttgcatgactgtggttcagaatcttatggagagaaataacctttcctatgattgcattgggcggctggaagttggaacagagacaatcatcgacaaatcaaagtctgtgaagactaatttgatgcagctgtttgaagagtctgggaatacagatatagaaggaatcgacacaactaatgcatgctat

SEQ ID NO: 618 - DNA, 511 bp, Homo sapiens
acgaggccacagaggcggcggagagatggccttcagcggttcccaggctccctacctgagtccagctgtccccttttctgggactattcaaggaggtctccaggacggacttcagatcactgtcaatgggaccgttctcagctccagtggaaccaggtttgctgtgaactttcagactggcttcagtggaaatgacattgccttccacttcaaccctcggtttgaagatggagggtacgtggtgtgcaacacgaggcagaacggaagctgggggcccgaggagaggaagacacacatgcctttccagaaggggatgccctttgacctctgcttcctggtgcagagctcagatttcaaggtgatggtgaacgggatcctcttcgtgcagtacttccaccgcgtgcccttccaccgtgtggacaccatctccgtcaatggctctgtgcagctgtcctacatcagcttccagcctcccggcgtgtggcctgccaacccggctcccattacccag

SEQ ID NO: 619 - DNA, 413 bp, Homo sapiens
gaattcggcacgagctggacaggagaagagcctggctgctgaaggcagggctgacacgaccacgggcagcattgctggagccccagaggatgaaagatcgcagagcacagccccccaggcaccagagtgcttcgaccctgccggaccggctgggctcgtgaggccgacatctggcctttcccagggcccaggaaaggaaaccttggaaagtgctctaatcgctctagactctgaaaaacccaagaaacttcgcttccacccaaagcagctgtacttctctgccaggcagggtgagctgcagaaggtgcttctcatgctggttgatggaattgatcccaacttcaaaatggagcaccaaagtaagcgttccccattacatgctgctgcggaggctggccacgtggacatctgcc

SEQ ID NO: 620 - DNA, 415 bp, Homo sapiens
gaattcggcacgagcggcgacggtggtggtgactgagcggagcccggtgacaggatgttggtgttggtattaggagatctgcacatcccacaccggtgcaacagtttgccagctaaattcaaaaaactcctggtgccaggaaaaattcagcacattctctgcacaggaaacctttgcaccaaagagagttatgactatctcaagactctggctggtgatgttcatattgtgagaggagacttcgatgagaatctgaattatccagaacagaaagttgtgactgttggacagttcaaaattggtctgatccatggacatcaagttattccatggggagatatggccagcttagccctgttgcagaggcaatttgatgtggacattcttatctcgggacacacacacaaatttgaag

SEQ ID NO: 621 - DNA, 421 bp, Homo sapiens
  misc_feature 8: n = A,T,C or G
agaattcngcacgagtggcagcctaagccgtgggagggttccagtcgagaatgggaagatgaaagacttcagatggaacagaaataaatgccttttttgacaaacgcagcagtgcgtgcctctagcttgcaagagcgttactccccttcatagctttaaaaggttttcgcactgcgtgcagttagagtagctaaatcttgtgtgacgctccacaaacacttgtaagaattttgcagagaaagataaccgttgccacccaatgccccccacaggcattctactccccagtacctcttagggtgggagaaatggtgaagagttgttcctacaacttgctaacctagtggacagggtagtagattagcatcatccggatagatgtgaagaggacggctgtttggataataattaaggataaaat

SEQ ID NO: 622 - DNA, 431 bp, Homo sapiens
  misc_feature 8, 11, 17: n = A,T,C or G
cccggggnggncctggncataaaactttaaattttactagtgttacttaatgtatattctaaaaagagaatgcagtaactaatgccctaaatgtttgatctctgtttgtcattactttttcaaaattatttttttctgtaaagtataatatataaaacttcttgcttaaattgaatttctatattagtggttaattgcagtttattaaagggatcattatcagtaatttcatagcaactgttctagtgttttgtgtttttaaaacagaattaggaatttgagatatctgattatatttttcatatgaatcacagacctcggccgcgaccacgctaagggcgaattccagcacactggcggccgctactagtggatccgagctcggtaccaagcttgggcgtaatcatggtcatagcctgtttcctgtgtga

SEQ ID NO: 623 - DNA, 421 bp, Homo sapiens
  misc_feature 81, 101, 103, 107, 111, 112, 180, 309, 331, 388, 404, 415: n = A,T,C or G
agaattcggcacgaggaaacatggactgccccttaaattttgactgtcctaaaaacctatttctgatttataatatgctgnctgataaagtgacactagangnaccnactnnatggtttaaatcttcccattcccagaatccagaattttggaagccattttaaccaggggtattttttncaccattaccttttggaactttccaaattaatggccttttaaaaaggttggaaggggaaaaccaaaaggccaaaattttaaaaaggttgggggggggaaccttaaaaaaaaaaatgggttttggggccncctttttttaaaaggccaaaanttttttgggttccaattaaaaaaatttcctttttccaacccaaaattaagaaaaggnaaaattaaaaaaattncaaaaattggntttttt

SEQ ID NO: 624 - DNA, 421 bp, Homo sapiens
aagaattcggcacgagcggatgtgctcactgacattctactccaagtcggagatgcagatccactccaagtcacacaccgagaccaagccccacaagtgcccacattgctccaagaccttcgccaacagctcctacctggcccagcacatccgtatacactcaggggctaagccctacagttgtaacttctgtgagaaatccttccgccagctctcccaccttcagcagcacacccgaatccacactggtgatagaccatacaaatgtgcacacccaggctgtgagaaagccttcacacaactctccaatctgcagtcccacagacggcaacacaacaaagataaacccttcaagtgccacaactgtcatcgggcgtacacggatgcagcctcactagaggtgcacctgtctacgcacaca

SEQ ID NO: 625 - DNA, 421 bp, Homo sapiens; identical to SEQ ID NO: 195

SEQ ID NO: 626 - DNA, 476 bp, Homo sapiens; identical to SEQ ID NO: 196

SEQ ID NO: 627 - DNA, 503 bp, Homo sapiens; identical to SEQ ID NO: 197

SEQ ID NO: 628 - DNA, 248 bp, Homo sapiens
taagtccagggggaataactgtaggcattcctggaatcactgtcttctgttccattgtgtcttggttccagcggctcctcttccgcttcttacttgggaagtccaacggcgtggcgttcgctccggtcgccatggcgcccccggggacaggcaccggcacctgcttttcctctgcggcggcttctccttcgcaagcctcccggggggaggggacccgaatgcgctgccggagcgcgcggagcccgtcc

SEQ ID NO: 629 - DNA, 99 bp, Homo sapiens
actgccagtccaaaggcatcgtggtgaccgcctacagccccctcggctctcctgacaggccctgggccaagcccgaggacccttctctcctggaggatc

SEQ ID NO: 630 - DNA, 640 bp, Homo sapiens
gaagacatgatgctacactcagctttgggtctctgcctcttactcgtcacagtttcttccaaccttgccattgcaataaaaaaggaaaagaggcctcctcagacactctcaagaggatggggagatgacatcacttgggtacaaacttatgaagaaggtctcttttatgctcaaaaaagtaagaagccattaatggttattcatcacctggaggattgtcaatactctcaagcactaaagaaagtatttgcccaaaatgaagaaatacaagaaatggctcagaataagttcatcatgctaaaccttatgcatgaaaccactgataagaatttatcacctgatgggcaatatgtgcctagaatcatgtttgtagacccttctttaacagttagagctgacatagctggaagatactctaacagattgtacacatatgagcctcgggatttacccctattgatagaaaacatgaagaaagcattaagacttattcagtcagagctataagagatgatggaaaaaagccttcacttcaaagaagtcaaatttcatgaagaaaacctctggcacattgacaaatactaaatgtgcaagtatatagattttgtaatattactatttagtttttttaatgtgtttg

SEQ ID NO: 631 - protein, 168 aa, Homo sapiens
EDMMLHSALGLCLLLVTVSSNLAIAIKKEKRPPQTLSRGWGDDITWVQTYEEGLFYAQKSKKPLMVIHHLEDCQYSQALKKVFAQNEEIQEMAQNKFIMLNLMHETTDKNLSPDGQYVPRIMFVDPSLTVRADIAGRYSNRLYTYEPRDLPLLIENMKKALRLIQSEL

SEQ ID NO: 632 - DNA, 402 bp, Homo sapiens
  misc_feature 285, 390: n = A,T,C or G
gcccggacgtaggtagtttgttgggccgggttctgaggccttgcttctctttacttttccactctaggccacgatgccgcagtaccagacctgggaggagttcagccgcgctgccgagaagctttacctcgctgaccctatgaaggcacgtgtggttctcaaatataggcattctgatgggaacttgtgtgttaaagtaacagatgatttagtttgtttggtgtataaaacagaccaagctcaagatgtaaagaaaattgagaaattccacagtcaactaatgcnacttatggtacccaaggaagcccgcaatgttaccatggaaactgagtgaatggtttgaaatgaaactttgtcgtgtacttaggaagtaaatatcttttgaattanaaaaagtgttgg

SEQ ID NO: 633 - DNA, 402 bp, Homo sapiens
  misc_feature 278, 387: n = A,T,C or G
gcggagtcgggtgggttggcggctataaagctggtagcgaaggggaggcgccgcggactgtcctttcgtggctcactccctttcctctgctgccgctcggtcacgcttgctctttcaccatgcctggatcacttcctttgaatgcagaagcttgctggccaaaagatgtgggaattgttgcccttgagatctattttccttctcaatatgttgatcaagcagagttggaaaaatatgatggtgtagatgctggaaagtataccattggcttgggccangccaagatgggcttctgcacagatagagaagatattaactctctttgcatgactgtggttcagaatcttatggagagaaataacctttcctatgattgcattgggcggntggaagttggaacag

SEQ ID NO: 634 - DNA, 386 bp, Homo sapiens
  misc_feature 27, 354, 363, 368, 369, 375: n = A,T,C or G
tgcaggtcgacactagtggatccaaanaattcggcacgaggctggcaagaagagacgaggcccggctgtggagcaactgaaccgggtgactgtcccaagctggactccctggtggcccagcagctgcagagcaagaatgagtgtggaatccttgccgaccccaaggggcccttccgggagtgccatagcaagctggacccccagggtgccgtgcgcgactgtgtctatgaccgctgcctgctgccaggccagtctgggccactgtgtgacgcactggccacctatgctgctgcatgccaggctgctggagccacagtgcacccctggaggagtgaagaactttgcccacttganctgccaccncacanncctatnaggcgtgttct

SEQ ID NO: 635 - DNA, 404 bp, Homo sapiens
gccaccacttcgtagtgttttggaacaaaccaagttaaagaaagaagatatttatgcagtggagatagttggtggtgctacacgaatccctgcggtaaaagagaagatcagcaaatttttcggtaaagaacttagtacaacattaaatgctgatgaagctgtcactcgaggctgtgcattgcagtgtgccatcttatcgcctgctttcaaagtcagagaattttctatcactgatgtagtaccatatccaatatctctgagatggaattctccagctgaagaagggtcaagtgactgtgaagtcttttccaaaaatcatgctgctcctttctctaaagttcttacattttatagaaaggaacctttcactcttgaggcctactacagctctcctcaggatttgc

SEQ ID NO: 636 - DNA, 403 bp, Homo sapiens
  misc_feature 321: n = A,T,C or G
gctcactggtccccagtgccctgctggagcaagcctatgctgtgcagatggacttcaacctgctagtggatgctgtcagccagaacgctgccttcctggagcaaactctttccagcaccatcaaacaggatgactttaccgctcgtctctttgacatccacaagcaagtcctaaaagagggcattgcccagactgtgttcctgggcctgaatcgctcagactacatgttccagcgcagcgcagatggctccccagccctgaaacagatcgaaatcaacaccatctctgccagctttgggggcctggcctcccggaccccanctgtgcaccgacatgttctcagtgtcctgagtaagaccaaagaagctggcaagatcctctctaataatcccagcaagggact

SEQ ID NO: 637 - DNA, 441 bp, Homo sapiens
  misc_feature 24: n = A,T,C or G
aggtcgacactagtggatccaaanaattcggcacgaggagagagaccctaaaagcaaaaatagaagggatgacccaaagtctgagaggtctggaattagatgttgttactataaggtcagaaaaagaaaatctgacaaatgaattacaaaaagagcaagagcgaatatctgaattagaaataataaattcatcatttgaaaatattttgcaagaaaaagagcaagagaaagtacagatgaaagaaaaatcaagcactgccatggagatgcttcaaacacaattaaaagagctcaatgagagagtggcagccctgcataatgaccaagaagcctgtaaggccaaagagcagaatcttagtagtcaagtagagtgtcttgaacttgagaaggctcagttgctacaaggccttgatgaggccaaaaataattatattgtttgca

SEQ ID NO: 638 - DNA, 404 bp, Homo sapiens
  misc_feature 324, 353, 371: n = A,T,C or G
gcgctgccgccgattccggatctcattgccacgcgcccccgacgaccgcccgacgtgcattcccgattccttttggttccaagtccaatatggcaactctaaaggatcagctgatttataatcttctaaaggaagaacagaccccccagaataagattacagttgttggggttggtgctgttggcatggcctgtgccatcagtatcttaatgaaggacttggcagatgaacttgctcttgttgatgtcatcgaagacaaattgaagggagagatgatggatctccaacatggcagccttttcttagaacaccaaagattgtctntggcaaagactataatgtaactgcaactncagctggcattatcacgntggggacgtcagaagaaggagaaagccgcttat

SEQ ID NO: 639 - DNA, 404 bp, Homo sapiens
  misc_feature 368, 375, 382, 384: n = A,T,C or G
gcatgtaccgagcacttcggctcctcgcgcgctcgcgtcccctcgtgcgggctccagccgcagccttagcttcggctcccggcttgggtggcgcggccgtgccctcgttttggcctccgaacgcggctcgaatggcaagccaaaattccttccggatagaatatgatacctttggtgaactaaaggtgccaaatgataagtattatggcgcccagaccgtgagatctacgatgaactttaagattggaggtgtgacagaacgcatgccaaccccagttattaaagcttttggcatcttgaaacgagcggccgctgaagtaaaccaggattatggtcttgatccaaaaattgctaatgcaataatgaangcagcanatgaagnanctgaaggtaaataaaatgat

SEQ ID NO: 640 - DNA, 401 bp, Homo sapiens
ggccaagtcagcttcttctgagagagtctctagaagacatgatgctacactcagctttgggtctctgcctcttactcgtcacagtttcttccaaccttgccattgcaataaaaaaggaaaagaggcctcctcagacactctcaagaggatggggagatgacatcacttgggtacaaacttatgaagaaggtctcttttatgctcaaaaaagtaagaagccattaatggttattcatcacctggaggattgtcaatactctcaagcactaaagaaagtatttgcccaaaatgaagaaatacaagaaatggctcagaataagttcatcatgctaaaccttatgcatgaaaccactgataagaatttatcacctgatgggcaatatgtgcctagaatcatgttt

SEQ ID NO: 641 - DNA, 404 bp, Homo sapiens
  misc_feature 170, 227, 252, 261, 285, 329, 341, 361, 367, 382, 386, 387,391, 395, 401: n = A,T,C or G
ggctcatcgcagacaccagccgacctaccggctttcggaccatggccaacctcgagcgtaccttcattgccatcaagccagatggcgtgcagcgcggcctggtgggcgagatcatcaaacgattcgagcagaaggggttccgctggtggccatgaagttccttcgggctnttgaagaacacctgaacagcattacatcgaccctgaacgaaccgtcctttctttccnggggctggtgaaatacatgaacttnggggccatngtgggcatgggcttgggaaggggntcaatggtggtggaaaaccggcccgaatgattcttggggggaanaacaaatccaanttgatttaaaaaccaggcanccattnccgggggggattttnttgnntttnaaanttgggnagg

SEQ ID NO: 642 - DNA, 366 bp, Homo sapiens
  misc_feature 26: n = A,T,C or G
tgcaggtcgacactagtggatccaantaattcggcacgaggagcaaaggcacatcttaaatggcaggggaactacccttgatacaaccatcagatctcatgagactcactgtcatgagaacagcagcatgggggtaacggccccatgattcaattacctcccactgagtccctcccacgacatatggggattatgggagctacaattcaagatgagatttaggtggggacacagccaaaccatttcaatagcataacaccaaaaaaggttatagagcagtaaaagggttgatggaccatgcatcagtaataataataataattataagtgatctttaaacattcatcaggtgccaagcctcgtgcc

SEQ ID NO: 643 - DNA, 403 bp, Homo sapiens
  misc_feature 145, 172, 174, 186, 187, 188, 193, 199, 200, 203, 205, 206,211, 213, 216, 218, 221, 229, 234, 239, 248, 251, 253, 256,257, 263, 264, 269, 272, 298, 314, 336, 339, 356, 365, 370,392, 394: n = A,T,C or G
gtgacctgatgagacagttaattatggccaatccacaaatgcagcagttgatacagagaaatccagaaattagtcatatgttgaataatccagatataatgagacaaacgttggaacttgccaggaatccacaatgatgcagganaagatgaagaaccaagacccaactttnancaacctaaaaannnttccnaggggnnttnanngtttnanggncnttntccccaanttttnagganccattgttnatngntgnncaaaannagttnggnggaaatccttttgtttccttggggancaatacatcctttggngaaggtagtcaaccttcccgtncanaaattagaaatcccctncccaatccntgggntccacaaacttcccaaagttantnagtttccac

SEQ ID NO: 644 - DNA, 403 bp, Homo sapiens
  misc_feature 117, 119, 124, 130, 131, 132, 136, 139, 141, 144, 148, 149,150, 155, 158, 159, 161, 163, 164, 165, 168, 169, 174, 176,177, 180, 183, 185, 193, 194, 199, 201, 203, 204, 209, 220,233, 235, 242, 248, 251, 265, 275, 282, 287, 294, 297: n = A,T,C or G
  misc_feature 307, 311, 373, 378: n = A,T,C or G
ggggatgacagccctaacaagaactgtttttgaatcgttgtgcagctccaggcaatagagtatgtgaagcgatttcagtagaatcacttactcatcctaaaagaaaacattattccnantaccntccttnnnattnccntnttntaannnaaacntanngntnnntgnntgttnannggnatnanctttaaanntgcantntnntttantcctccaaatntttttcggtttcntntgagaancaccanaanctttctttcccttntcttcagtanttgcaanagganacctccnttnaggactggcntagngaacgtaatccatgctttaactgccattaaacagccccatggttggattttttttttttttngagtnggctttccaaaaccttgtcaaaaac

SEQ ID NO: 645 - DNA, 405 bp, Homo sapiens
  misc_feature 205, 223, 262, 281, 339, 357, 369, 374, 387: n = A,T,C or G
gcgccttccaggccgcactccagagccaaaagagctccatggcggcggcggccaagcccaacaacctttccctggtggtgcacggaccgggggacttgcgcctggagaactatcctatccctgaaccaggcccaaatgaggtcttgctgaggatgcattctgttggaatcttgtggcttaaatgtcactactgggagtatgggcnaattgggaattttattgngaaaaacccatggggttggacatgaagttcggacagtcnaaaaagtgggatcatcggnaaagacctaaaaccaggtgatcggttgcatcacctgggctcccgaaaaatgataattntgaagatggccatacatntgtaccttcatnttttntggcacccccccnatacggaactttgcggtt

SEQ ID NO: 646 - DNA, 412 bp, Homo sapiens
  misc_feature 378: n = A,T,C or G
ggaacccagtgcctgcagccatggctcccggccagctcgccttatttagtgtctctgacaaaaccggccttgtggaatttgcaagaaacctgaccgctcttggtttgaatctggtcgcttccggagggactgcaaaagctctcagggatgctggtctggcagtcagagatgtctctgagttgacgggatttcctgaaatgttggggggacgtgtgaaaactttgcatcctgcagtccatgctggaatcctagctcgtaatattccagaagataatgctgacatggccagacttgatttcaatcttataagagttgttgcctgcaatctctatccctttgtaaagacaagtggcttctccaggtgtaactgttgaggangctgtgggagcaaattgacattggtgggagtaac

SEQ ID NO: 647 - DNA, 412 bp, Homo sapiens
  misc_feature 55, 56, 61, 63, 68, 79, 90, 136, 137, 159, 160, 163, 205,219, 223, 314, 373, 384, 388, 400: n = A,T,C or G
ggtcgcccggcgccccagcccggccgcggcgctccccgcctccccgctagcgcanncggcngntctgntcggctgattnccagctatganacaaggagaatgaaaatatgaagaaaaagctgaacaaaaaagttanntagctaaaacaggacttgcagnnttnaaaacaggtccttgatggcaaagaagaggttgagaaacaacntagagaaaatattnaaantctaaattccatggtagaacgccaagagaaagatcttggccgtcttcaggtagacatggatgaacttgaagaaaagaaccgaagtattcangctgcctggatagtgcatacaaagaacttactgatctttacaaagccaatgctgcaaangatagtgaggnacangaagctgctctnaccgtgaaatga

SEQ ID NO: 648 - DNA, 413 bp, Homo sapiens
  misc_feature 158, 165, 181, 196, 205, 211, 220, 269, 271, 278, 279, 281,284, 298, 300, 304, 307, 308, 311, 312, 323, 335, 346, 353,354, 359, 382, 385, 387, 389, 391, 396, 397, 398, 399, 404: n = A,T,C or G
ggtcgcccggcgccccagcccggccgcggcgctccccgcctccccgctagcgcagcccggcggctctgcccggctgccgcccggcatgaacatcatggatttcaacgtgaagaaacttggcgggccgaccgggcaccttttcttaagccggcccgtgnaatttanaaaaaaaaaacttggncaagcaaaaaaaaanaaaattggnccttancttgaaaancttcttaacaaaacttaatggtccaaaatattgaccgaaaaaaaaatgnancaaaccnnantgnttttgcacccaatncnaatnccnngannaaaaaaattgnttattaaaaacntgaataaaaanccccaannctatnaacaaccccgaactttttggacnatntntnantgatnnnngaacntaatttggc

SEQ ID NO: 649 - DNA, 409 bp, Homo sapiens
  misc_feature 18, 34, 40, 281, 348, 351, 358, 365, 370, 386, 392: n = A,T,C or G
actagtggatccaaaganttcggcacgagggcanggtgtncgggcgggaaggggcacgggcacccccgcggtcctcgggaggctagagatcatggaagggaagtggttgctgtgtatgttactggtgcttggaactgctattgttgaggctcatgatggacatgatgatgatgtgattgatattgaggatgaccttgacgatgtcattgaagaggtagaagactcaaaaccagataccactgctcctccttcatctcccaaggttacttacaaagctccanttccaacaggggaagtatattttgctgattcttttgacagaggaactctgtcagggtggattttatncanagccaanaaagacnatccnatgatgaaaattgccnaatatnatggaaaagtgggaggt

SEQ ID NO: 650 - DNA, 413 bp, Homo sapiens
  misc_feature 404: n = A,T,C or G
ggcctgaggaccggcaacatggtgcggtcggggaataaggcagctgttgtgctgtgtatggacgtgggctttaccatgagtaactccattcctggtatagaatccccatttgaacaagcaaagaaggtgataaccatgtttgtacagcgacaggtgtttgctgagaacaaggatgagattgctttagtcctgtttggtacagatggcactgacaatcccctttctggtggggatcagtatcagaacatcacagtgcacagacatctgatgctaccagattttgatttgctggaggacattgaaagcaaaatccaaccaggttctcaacaggctgacttcctggatgcactaatcgtgagcatggatgtgattcacatgaaacaataggaaagaagtttgagaanaagcatatt

SEQ ID NO: 651 - DNA, 441 bp, Homo sapiens
  misc_feature 17: n = A,T,C or G
ctagtggatccaaaganttcggcacgaggcaaccagtgacactgcagggagaaatgctcttcacctggctgctaagtatggacatgcattgtgcctacaaaaacttctacagtacaattgtcccactgagcatgcagacctgcagggaagaactgcacttcacgatgccgcaatggcagattgtccttctagcatacagctgctttgtgaccatggggcctctgtgaatgccaaagatgtagacgggcggacaccacttgttctggctactcagatgagtaggccaacaatgtgtcaactgctgatagatagaggagcggatgttaattccagagacaaacaaaacagaactgccctcatgctaggttgcgaatatggttgcagagatgcagtagaagtcttaattaaaaatgggtgctgatataagcttgctggatgcgc

SEQ ID NO: 652 - DNA, 412 bp, Homo sapiens
gcttctctctcctgtgcaaaatggcaactcttaaggaaaaactcattgcaccagttgcggaagaagaggcaacagttccaaacaataagatcactgtagtgggtgttggacaagttggtatggcgtgtgctatcagcattctgggaaagtctctggctgatgaacttgctcttgtggatgttttggaagataagcttaaaggagaaatgatggatctgcagcatgggagcttatttcttcagacacctaaaattgtggcagataaagattattctgtgaccgccaattctaagattgtagtggtaactgcaggagtcccgtcagcaagaaggggagagtcggctcaatctggtgcagagaaatggtaatgtcttcaaattcattattcctcagatccgcaagtacagtcctg

SEQ ID NO: 653 - DNA, 414 bp, Homo sapiens
gccagttcaagtccaccctgccggacgccgatagggagcgcgaggccatcctggccatccacaaggaggcccagaggatcgctgagagcaaccacatcaagctgtcgggcagcaacccctacaccaccgtcaccccgcaaatcatcaactccaagtgggagaaggtgcagcagctggtgccaaaacgggaccatgccctcctggaggagcagagcaagcagcagtccaacgagcacctgcgccgccagttcgccagccaggccaatgttgtggggccctggatccagaccaagatggaggagatcgggcgcatctccattgagatgaacgggaccctggaggaccagctgagccacctgaagcagtatgaacgcagcatcgtggactacaaagcccaacctggaccttgttgga

SEQ ID NO: 654 - DNA, 404 bp, Homo sapiens
gcatggcggagctgacggtggaggttcgcggctccaacggggctttctacaagggatttatcaaagatgtccacgaagactccctcacagttgtttttgaaaataattggcaaccagaacgccaggttccgtttaatgaagtgcgattaccaccaccacctgatataaaaaaagaaattagtgaaggagatgaagtagaggtatattcaagagcaaatgaccaagagccatgtggatggtggctggctaaagttcggatgatgaaaggcgagttttatgtcattgaatatgctgcttgtgatgccacttacaatgaaatagtcacatttgaacgacttcggcctgtcaatcaaaataaaactgtcaaaaaaaataccttctttaagtgcacagtggatgttcct

SEQ ID NO: 655 - DNA, 402 bp, Homo sapiens
gggcaagatcaccattagcaaatggaaattacatttgaaagccattagacttataggtgatgcaagcatctaagagagaggttaatcacactatagaggcataagtggtatcagttttcatttttctaattgtttaaactgtgttttataccagtgtttgcaagtaattgggtgttagcttgagatggttaaaggtggtttggggagggacttcgttgtaatggttttgctgtaaaaaatgtttccaactccgctgaaatgttgctgaaaagcatggtgctggtaacagttcaacaatccgtggctgctcattcttgcctactttactctcccactgaagcaggttagcgtttgaaggtggtatggaaaacctgcatgcctgttcaattcttttgtttcttc

SEQ ID NO: 656 - DNA, 416 bp, Homo sapiens
gaatcggcacgaggtcagccgcgaggtgtccggcatcaaggccgcctacgaggccgagctcggggatgcccgcaagacccttgactcagtagccaaggagcgcgcccgcctgcagctggagctgagcaaagtgcgtgaggagtttaaggagctgaaagcgcgcaataccaagaaggagggtgacctgatagctgctcaggctcggctgaaggacctggaggctctgctgaactccaaggaggccgcactgagcactgctctcagtgagaagcgcacgctggagggcgagctgcatgatctgcggggccaggtggccaagcttgaggcagccctaggtgaggccaagaagcaacttcaggatgagatgctgcggcgggtggatgctgagaacaggctgcagaccatgaaggaggaac

SEQ ID NO: 657 - DNA, 402 bp, Homo sapiens
  misc_feature 150, 153, 154: n = A,T,C or G
gctccaagcagacacaatggtaagaatggtgcctgtcctgctgtctctgctgctgcttctgggtcctgctgtcccccaggagaaccaagatggtcgttactctctgacctatatctacactgggctgtccaagcatgttgaagacgtccncgnntttcaggcccttggctcactcaatgacctccagttctttagatacaacagtaaagacaggaagtctcagcccatgggactctggagacaggtggaaggaatggaggattggaagcaggacagccaacttcagaaggccagggaggacatctttatggagaccctgaaagacattgtggagtattacaacgacagtaacgggtctcacgtattgcagggaaggtttggtttgtgagatcgagaataaca

SEQ ID NO: 658 - DNA, 404 bp, Homo sapiens
gcaagacgccacttcccctatcatagaagagcttatcacctttcatgatcacgccctcataatcattttccttatctgcttcctagtcctgtatgcccttttcctaacactcacaacaaaactaactaatactaacatctcagacgctcaggaaatagaaaccgttgaactatcctgcccgccatcatcctagtcctcatcgccctcccatccctacgcatcctttacataacagacgaggtcaacgatccctcccttaccatcaaatcaattggccaccaatggtactgaacctacgagtacaccgactacggcggactaatcttcaactcctacatacttcccccattattcctagaaccaaggcggacctgcgactccttgacgttgacaatcgagtagta

SEQ ID NO: 659 - DNA, 411 bp, Homo sapiens
ggcacgagggtcgccgttactccgaggagataccagtcggtagaggagaagtcgaggttagagggaactgggaggcactttgctgtctgcaatcgaagttgagggtgcaaaaatgcagagtaataaaacttttaacttggagaagcaaaaccatctccaagaaaagcatcatcaacatcaccaccagcagcagcaccaccagcagcaacagcagcagccgccaccaccgccaatacctgcaaatgggcaacaggccagcagccaaaatgaaggcttgactattgacctgaagaattttagaaaaccaggagagaagaccttcacccaacgaagccgtctttttgtgggaaatcttcctcccgacatcactgaggaagaaatgaggaaactatttgagaaatatggaaaggc

SEQ ID NO: 660 - DNA, 412 bp, Homo sapiens
ggcacgagggggatttgggtcgcagttcttgtttgtggatcgctgtgatcgtcacttaacaatgcagatcttcgtgaagactctgactggtaagaccatcaccctcgaggttgagcccagtgacaccatcgagaatgtcaaggcaaagatccaagataaggaaggcatccctcctgaccagcagaggctgatctttgctggaaaacagctggaagatgggcgcaccctgtctgactacaacatccagaaagagtccaccctgcacctggtgctccgtctcagaggtgggatgcaaatcttcgtgaagacactcactggcaagaccatcacccttgaggtcgagcccagtgacaccatcgagaacgtcaaagcaaagatccaggacaaggaaggcattcctcctgaccagcag

SEQ ID NO: 661 - DNA, 411 bp, Homo sapiens
ggcacgaggggagatcgatgatcttgccagtaatgtagagacagtgtctaaggccaagggaaacctcgagaagatgtgccgcaccctggaggaccaggtgagtgagctgaagtcaaaggaggaggaacagcagcgactgatcaacgacctgacaacccagagaggacgactgcagaccgaatccggtgaattttccaggcagcttgatgagaaggaagcgctggtatctcagttatcaaggggcaaacaggcattcactcaacagattgaggagctaaagaggcaacttgaagaggaagtaaaggccaagaacgcgctggcccacgccctgcagtcctcccgccatgactgtgacctgctgcgggaacagtacgaggaggagcaggagtctaaggctgaactgcagagggc

SEQ ID NO: 662 - DNA, 414 bp, Homo sapiens
ggcacgaggctcacaggaccagccactagcgcagcctcgagcgatggcctatgtccccgcaccgggctaccagcccacctacaacccgacgctgccttactaccagcccatcccgggcgggctcaacgtgggaatgtctgtttacatccaaggagtggccagcgagcacatgaagcggttcttcgtgaactttgtggttgggcaggatccgggctcagacgtcgccttccacttcaatccgcggtttgacggctgggacaaggtggtcttcaacacgttgcagggcgggaagtggggcagcgaggagaggaagaggagcatgcccttcaaaaagggtgccgcctttgagctggtcttcatagtcctggctgagcactacaaggtggtggtaaatggaaatcccttctatgagta

SEQ ID NO: 663 - DNA, 414 bp, Homo sapiens
  misc_feature 140, 167, 214, 320, 339, 391, 406: n = A,T,C or G
gcggcgctccttcctcctcggctcgcgtctcactcagtgtaccttctagtcccgccatggccgctctcacccgggacccccagttccagaagctgcagcaatggtaccgcgagcaccgctccgagctgaacctgcgccgnctcttcgatgccaacaaggaccgcttnaaccacttcagcttgaccctcaacaccaaccatgggcatatcctggnggattactccaagaacctggtgacggaggacgtgatgcggatgctggtggacttggccaagtccaggggcgtggaggccgaccgggagcggatgttcaatggtganaagatcaactacacccganggtcgagccgtgctgcacgtggctctgcggaaccggttcaaacacacccatnctgggagacggcaangatgtgat

SEQ ID NO: 664 - DNA, 411 bp, Homo sapiens
ggcacgaggcttagatgccgtgccatgctccacaaccatcaacaggaaccgcatgggccgagacaagaagagaaccttccccctttgctttgatgaccatgacccagctgtgatccatgagaacgcatctcagcccgaggtgctggtccccatccgctggacatggagatcgatgggcagaagctgcgagacgccttcacctggaacatgaatgagaagttgatgacgcctgagatgttttcagaaatcctctgtgacgatctggatttgaacccgctgacgtttgtgccagccatcgcctctgccatcagacagcagatcgagtcctaccccacggacagcatcctggaggaccagtcagaccagcgcgtcatcatcaagctgaacatccatgtgggaaacatttccctg

SEQ ID NO: 665 - DNA, 409 bp, Homo sapiens
ggcacgagggcgaatcgcagcttctgagaccagggttgctccgtccgtgctccgcctcgccatgacttcctacagctatcgccagtcgtcggccacgtcgtccttcggaggcctgggcggcggctccgtgcgttttgggccgggggtcgcttttcgcgcgcccagcattcacgggggctccggcggccgcggcgtatccgtgtcctccgcccgctttgtgtcctcgtcctcctcggggggctacggcggcggctacggcggcgtcctgaccgcgtccgacgggctgctggcgggcaacgagaagctaaccatgcagaacctcaacgaccgcctggcctcctacctggacaaggtgcgcgccctggaggcggccaacggcgagctagaggtgaagatccgcgactggtac

SEQ ID NO: 666 - DNA, 411 bp, Homo sapiens
ggcacgaggtgagctgaaccaagaaggaggagggggtcgggcctccgaggaaggcctagctgctgctgctgccaggaattccaggttggaggggcggcaacctcctgccagccttcaggccactctcctgtgcctgccagaagagacagagcttgaggagagcttgaggagagcaggaaagcagcctcccccgttgcccctctggatccactgcttaaatacggacgaggacagggccctgtctcctcagcttcaggcaccaccactgacctgggacagtgaatcgacaatgccgtcttctgtctcgtggggcatcctcctgctggcaggcctgtgctgcctggtccctgtctccctggctgaggatccccagggagatgctgcccagaagacagatacatcccaccatga

SEQ ID NO: 667 - DNA, 412 bp, Homo sapiens
ggcacgaggattatccagaaccttgagaaagacagacaaaaattggtcagcagccaggagcaagacagagaacagttaattcagaagcttaattgtgaaaaagatgaagctattcagactgccctaaaagaatttaaattggagagagaagttgttgagaaagagttattagaaaaagttaaacatcttgagaatcaaatagcaaaaagtcctgccattgactctaccagaggagattcttcaagcttagttgctgaacttcaagaaaagcttcaggaagaaaaagctaagtttctagaacaacttgaagagcaagaaaaaagaaagaatgaagaaatgcaaaatgttcgaacatctttgattgcggaacaacagaccaattttaacactgttttaacaagagagaaaatga

SEQ ID NO: 668 - DNA, 411 bp, Homo sapiens
  misc_feature 14, 26, 28, 29, 34, 59, 66, 71, 85, 86, 87, 88, 100, 124,128, 129, 130, 138, 145, 154, 155, 157, 160, 162, 173, 179,186, 189, 190, 191, 198, 199, 200, 201, 206, 218, 219, 221,223, 230, 244, 252, 258, 259, 275, 282, 289, 298, 300: n = A,T,C or G
  misc_feature 301, 303, 308, 309, 313, 316, 317, 318, 320, 323, 324, 334,349, 350, 353, 355, 359, 363, 364, 368, 373, 381, 382, 383,399, 402, 403, 406, 407: n = A,T,C or G
ggcacgagggtctngggcgcgctcanannagatnatcaacctgcgagaggtcagcaccngcttccncctgncacccggggagtannnnttaattgtgaanaagatgaaagctattcagacttgncctnnnataatttnaattggngaggagaanntnttntnatcaaaagttnttttanaaaaagntannncatcttnnnntaatnaaagtattacannantnactgccnattgactttaccanaagagaangcttcnnggctttgttgctgaancttaatnaaaaggntatggggantnnanaaaanntaanttnnntnganntaatctttgnttgcagcttatcatnnttngntatnaaannaganaatanttctaatnnntgttttcgaatctatnatnnctnntttt

SEQ ID NO: 669 - DNA, 412 bp, Homo sapiens
ggcacgagggcagagaaaccagattctctctcagcagttacagcagatggaagctgagcataatactttgaggaacactgtggaaacagaaagagaggagtccaagattctactggaaaagatggaacttgaagtggcagagagaaaattatccttccataatctgcaggaagaaatgcatcatcttttagaacagtttgagcaagcaggccaagcccaggctgaactagagtctcggtatagtgctttggagcagaagcacaaagcagaaatggaagagaagacctctcatattttgagtcttcaaaagactggacaagagctgcagtctgcctgtgatgctctaaaggatcaaaattcaaagcttctccaagataagaatgaacaggcagttcagtcagcccagaccatt

SEQ ID NO: 670 - DNA, 411 bp, Homo sapiens
  misc_feature 154, 352, 373: n = A,T,C or G
ggcacgaggagagggacttccagagaagctggttataaaaaaccagcaatttcacaaggaacgagagcagccacccagatttgcacagcctggctcctttgagtatgaatatgccatgcgctggaaggcactcattgagatggagaagcagcancaggaccaagtggaccgcaacatcaaggaggctcgtgagaagctggagatggagatggaagctgcacgccatgagcaccaggtcatgctaatgagacaggatttgatgaggcgccaagaagaacttcggaggatggaagagctgcacaaccaagaggtgcaaaaacgaaagcaactggagctcaggcaggaggaagancgcaggcgccgtgaagaaganatgcggcggcagcaagaagaaatgatgcggcgacagca

SEQ ID NO: 671 - DNA, 411 bp, Homo sapiens
  misc_feature 160: n = A,T,C or G
ggcacgagggcaacatccagcctcctgacaaggtgatccgggcgggccccgcaggaattttatcccctcaccggcctcacactagtatcgcatgtccactatccagaacctccaatctttcgacccctttgctgatgcaactaagggtgacgacttactnccggcagggactgaggattacattcatataagaatccagcaacggaacggcagaaagacactgactactgttcagggcattgcagatgattatgacaaaaagaaacttgtgaaagctttcaaaaagaaatttgcctgtaatggtactgtgattgaacatcctgaatacggagaggttattcagcttcaaggtgaccaaagaaaaaacatctgccagtttctcttggaggttggcattgtaaaggaggaaca

SEQ ID NO: 672 - DNA, 409 bp, Homo sapiens
ggcacgaggcccactccaccttactaccagacaaccttagccaaaccatttacccaaataaagtataggcgatagaaattgaaacctggcgcaatagatatagtaccgcaagggaaagatgaaaaattataaccaagcataatatagcaaggactaacccctataccttctgcataatgaattaactagaaataactttgcaaggagagccaaagctaagacccccgaaaccagacgagctacctaagaacagctaaaagagcacacccgtctatgtagcaaaatagtgggaagatttataggtagaggcgacaaacctaccgagcctggtgatagctggttgtccaagatagaatcttagttcaactttaaatttgcccacagaaccctctaaatccccttgtaaatt

SEQ ID NO: 673 - DNA, 412 bp, Homo sapiens
  misc_feature 16, 26, 30, 44: n = A,T,C or G
ggcacgaggggaaaanctgggccccntctncacagccgaccaanggcagcgggctctgcccggcgccgctttctgcgacctggccgtcagccccacgtcgccggcctggaggggcaaagaggacgagggggccgcggcttcctccggggaccttggcttgcctggattgccaggagctggaagttgacattgagtctaggctgaggatggaaggtgtggagctgaaggaagaatggcaggatgaagattttccaatacctttaccagaagatgacagcattgaagcagatacactagatggaactgatccagacagacagcctggctccttagaagttaatgggaacaaagtaaggaagaaactgatggccccagacatcagcctgaccctggatcctggtgaagactctct

SEQ ID NO: 674 - DNA, 413 bp, Homo sapiens
  misc_feature 391: n = A,T,C or G
gcacagcctcacttctaaccttctggaacccacccaccactgccaagctcactattgaatccacgccgttcaatgtcgcagaggggaaggaggttcttctactcgcccacaacctgccccagaatcgtattggttacagctggtacaaaggcgaaagagtggatggcaacagtctaattgtaggatatgtaataggaactcaacaagctaccccagggcccgcatacagtggtcgagagacaatataccccaatgcatccctgctgatccagaacgtcacccagaatgacacaggattctataccctacaagtcataaagtcagatcttgtgaatgaagaagcaaccggacagttccatgtatacccggagctgcccaagccctccatctncagcaacaactccaaccccgtg

SEQ ID NO: 675 - DNA, 411 bp, Homo sapiens
  misc_feature 167, 183, 316, 381: n = A,T,C or G
ggcacgaggtattgttgctccagacacagtgatccactgtgagggggagccaatcaagcgagaggatgaggaggaatccttgaatgaagtaggctatgatgacatcggtggttgcaggaagcagctagctcaaataaaggagatggtggagctgccactgagacatnctgcgctctttaaggngattggtgtaaagcctcctcggggaatcttgttgtatgggccttctgggacagggaagaccctgattgctcgagctgtggcaaatgaaactggagccttcttctttctgatcaatggtcctgaaatcattgancaaattggctggtgagtctgagagcaaccttcgtaaagcctttgaggaagctgaaaagaatgctnctgctatcatcttcatcgatgaacttgatg

SEQ ID NO: 676 - DNA, 413 bp, Homo sapiens
  misc_feature 56, 143, 173, 210, 267, 270, 350, 378, 389: n = A,T,C or G
ggcacgaggcgggagcggcgcaggcggccgagcgggactggctgggtcggctgggntgctggtgcgaggagccgcggggctgtgctcggcggccaaggggacagcgcgtgggtggccgaggatgctgcggggcggtagctccngcgcccctccttggtgactgcttgcgccgngcctcacacagccgaaggcgggctcggcgcacagtcngctgctccgcgctcgcgcccggcggcgctccaggtgctgacagcgcgagagagcgcnggncctcaggagcaaggcgaatgtatgacaacatgtccacaatggtgtacataaaggaagacaagttggagaagcttacacangatgaaattattttctaagacaaaagcnagtaaattcanggggcctgggaaagctttgaagaa

SEQ ID NO: 677 - DNA, 410 bp, Homo sapiens
ggcacgagggccaagtcagcttcttctgagagagtctctagaagacatgatgctacactcagctttgggtctctgcctcttactcgtcacagtttcttccaaccttgccattgcaataaaaaaggaaaagaggcctcctcagacactctcaagaggatgggggagatgacatcacttgggtacaaacttatgaagaaggtctcttttatgctcaaaaaagtaagaagccattaatggttattcatcacctggaggattgtcaatactctcaagcactaaagaaagtatttgcccaaaatgaagaaatacaagaaatggctcagaataagttcatcatgctaaaccttatgcatgaaaccactgataagaatttatcacctgatgggcaatatgtgcctagaatcatgttt

SEQ ID NO: 678 - DNA, 410 bp, Homo sapiens
ggcacgaggaattaatgaagtctttaatgaacttatattagatgtgttaaagcagggttacatgatgaaaaagggccacagacggaaaaactggactgaaagatggtttgtactaaaacccaacataatttcttactatgtgagtgaggatctgaaaggataagaaaggagacattctcttggatgaaaattgctgtgtagagtccttgcctgacaaagatggaaagaaatgcctttttctcgtaaaatgttttgataagacttttgaaatcagtgcttcagataagaagaagaaacaggagtggattcaagccattcattctactattcatctgttgaagctgggcagccctccaccacacaaagaagcccgccagcgtcggaaagaactccggaagaagcagctggct

SEQ ID NO: 679 - DNA, 410 bp, Homo sapiens
  misc_feature 353: n = A,T,C or G
ggcacgagggagagagaatagttcgagtttttttttttttttattgcaagcatatttcttttaatgactccagtaaaattaagcatcaagtaaacaagtggaaagtgacctacacttttaacttgtctcactagtgcctaaatgtagtaaaggctgcttaagttttgtatgtagttggattttttggagtccgaaggtatccatctgcagaaattgatgcccaaattgaatttggattcaagtggattctaaatactttgcttatcttgaagagagaagcttcataaggaataaacaagttgaatagagaaaacactgattgataataggcattttagtgggctttttaatgntttctgctgtgaaacatttcaagatttattgatttttttttttcactttccccatca

SEQ ID NO: 680 - DNA, 410 bp, Homo sapiens
ggcacgaggcaattctggaaacaatgggaacaatggaaaagagagagaggactcctggaaaggagcttctgttcagaaatcaactgggtcaaaaaatgactcttgggacaacaataacaggtctacgggtgggtcctggaactttggcccccaggactctaatgacaacaaatggggtgaagggaacaaaatgacatctggggtctctcagggagaatggaaacagccgactgggtctgatgagttgaaaattggagaatggagtggtccaaaccaaccaaattctagcactggagcatgggacaatcaaaagggccaccccctccctgaaaaccaaggcaatgcccaggctccctgttggggaagatcttccagctccacaggaagtgaagttggaggtcaaagcactg

SEQ ID NO: 681 - DNA, 402 bp, Homo sapiens
gccggagcctaccctgccactggcccctatggcgcccctgctgggccactgattgtgccttataacctgcctttgcctgggggagtggtgcctcgcatgctgataacaattctgggcacggtgaagcccaatgcaaacagaattgctttagatttccaaagagggaatgatgttgccttccactttaacccacgcttcaatgagaacaacaggagagtcattgtttgcaatacaaagctggataataactggggaagggaagaaagacagtcggttttcccatttgaaagtgggaaaccattcaaaatacatgtactggttgaacctgaccacttcaaggttgcagtgaatgatgctcacttgttgcagtacaatcatcgggttaaaaaactcaatgaaatc

SEQ ID NO: 682 - DNA, 401 bp, Homo sapiens
gggcgagcggagttagcagggctttactgcagagcgcgccgggcactccagcgaccgtggggatcagcgtaggtgagctgtggccttttgcgaggtgctgcagccatagctacgtgcgttcgctacgaggattgagcgtctccacccatcttcttgtgcttcaccatctacataatgaatcccagtatgaagcagaaacaagaagaaatcaaagagaatataaagaatagttctgtcccaagaagaactctgaagatgattcagccttctgcatctggatctcttgttggaagagaaaatgagctgtccgcaggcttgtccaaaaggaaacatcggaatgaccacttaacatctacaacttccagccctggggttattgtcccagaatctagtgaaaataa

SEQ ID NO: 683 - DNA, 3255 bp, Homo sapiens
accgttgcggccgcaggggtctgggcagggctgggcagtgctgccggagcaaaagcggtagcgggagcccggccggagctgggtctggagacgccgtggcagcctgaacggagtgtgcgacggattgggaggtttgtctacagattttgagcgttcgaagttgacccctgactaagtatactttgctgctccctcagcctttgaaaaaatgtctgtcacatatgatgattccgttggagtagaagtgtccagcgacagcttctgggaggtcgggaactacaagcggactgtgaagcggatcgacgatggccaccgcctgtgcagcgacctcatgaactgcctgcatgagcgggcgcgcatcgagaaggcgtatgcgcagcagctcactgagtgggcccggcgctggaggcagcttgtggagaaagggccccagtacgggaccgtggagaaggcctggatggccttcatgtccgaggcagagagggtgagcgagctgcacctcgaggtgaaggcctcactgatgaacgatgacttcgagaagatcaagaactggcagaaggaagcctttcacaagcagatgatgggcggcttcaaggagaccaaggaagctgaggacggctttcggaaggcacagaagccctgggccaagaagctgaaagaggtagaagcagcaaagaaagcccaccatgcagcgtgcaaagaggagaagctggctatctcacgagaagccaacagcaaggcagacccatccttcaaccctgaacagctcaagaaattgcaagacaaaatagaaaagtgcaagcaagatgttcttaagaccaaagagaagtatgagaagtccctcaaggaactcgaccagggcacaccccagtacatggagaacatggagcaggtgtttgagcagtgccagcagttcgaggagaaacgccttcgcttcttccgggaggttctgctggaggttcagaagcacctaaacctgtccaatgtggctggttacaaagccatttaccatgacctggagcagagcatcagagcagctgatgcagtggaggacctgaggtggttccgagccaatcacgggccaggcatggccatgaactggccgcagtttgaggagtggtccgcagacctgattcgaaccctcagccggagagagaagaagaaggccactgacggcttcaccctgacgggcatcaaccagacaggcgaccagtttttgccgagtaagcccagcagcacccttaatgtcccgagcaaccccgcccagtctgcgcagtcacagtccagctacaaccccttcgaggatgaggacgacacgggcagcaccgtcagtgagaaggaggacattaaggccaaaaatgtgagcagctacgagaagacccagagctatcccaccgactggtcagacgatgagtctaacaaccccttctcctccacggatgccaatggggactcgaatccattcgacgacgacgccacctcggggacggaagtgcgagtccgggccctgtatgactatgaggggcaggagcatgatgagctgagcttcaaggctggggatgagctgaccaagatggaggacgaggatgagcagggctggtgcaagggacgcttggacaacgggcaagttggcctatacccggcaaattatgtggaggcgatccagtgatgagtcggggacaggccagcggggggacggaggcggcgggcccaggagcctcagccagccacgtgggcatccactccttttcctgcaagagatgatggttccattgctcttggcttcatggtgttcctggaaggcagatgagctggtcatttcgcctgggactcggcacctttccgagtgcagctggagggatctgagcgcaggaagacgcagaacaacagaaatagccgcccctccccgcccactgtgcctgttggcctatcatagatctctatgttcttgactttgtctctcctttccgagtcaatggtgggttacactgatcttgttccactgattactctctctgacgagtccatcacctgcaacttaaatgaacaagcttacatcccattttgagtgaagattttgaggtttttaatttaaaggctgtgtacagttatacttttttatacacctgttcatttctacttaaattatggcacagattgatgcgcaccagtcttgaggaaacgatctccctattcccttaccctgttactcagccacgccgtgtgtaggcttagcctcaggtggcagatgtttgaggaaaggaattatgccaggaaggtgggaccgggttatggtcgggtttctattgggaatgctctttgtgcttttgggcatctgaatggaagctttacatagaaccttaggtagaactcccccaaatcgccatatttaaaaattattttcactctattcttgcttaaaactgtactcttttgcaaattaacaattttatcactgattcagagttaaaaagaagactaacttttcaagcaaatgcatctgtaaagatgctttagattagactgtcatgtctcagtgtctatctgtatatattatttgatattcagagaatctaaagcactcgtctactgttttaatgagatttaacagcttttaacagtgagtttcgtttgtaaactgcttgaagtctgtggcattcaggcacacgtctggctggccggctgggtctcctcccgggctcagtgggcctggggcctctctgacgtggtgcctgctggagggaggctcgtcgtcaccagctgactgctggtccggcttctgaccggcctttgtcctggctccgtagcagaacactgtaaaagtgcccgcgtctttgcagtagttgcagatttcagtcgtcgtgttacttgtgcacaaacagaagctgggtcttacccgcagcacgagtgtctcgggctgcccggagtcgcccgggagcaggtgctgcagccagagttacgcgggggccacgcgggccggcgggggtggggggaacgtgggggaacctgtgtttcacgtgactcagcagtgcccgccgccgtcaccagctatgcattcactccgtttccagtgagcagatgtcttgcttggaaagtggacctgtgtctgtgtctgtcctgagaacttaccagcagaaatcctcatttctgtgctacggatttaccaaaaattgtcaagtctttttcagtttaacagttcctttacatgtgtagtatttgaggaaaaaaatcaataaacagttgatctcgtgcata

SEQ ID NO: 684 - DNA, 2993 bp, Mus musculus
ctggagtgtctgctgccaccccctcgtcctctgcagaaatgtctgtcacctacgatgactctgtgggagtggaagtgtccagcgacagcttctgggaggttgggaactacaaacggactgtgaagcggattgacgatggccaccgcctgtgtggtgacctcatgaactgtctgcatgagcgggcacgcatcgagaaggcgtatgcacagcagctcactgagtgggcccgacgctggaggcagctggtagagaagggaccacagtatgggaccgtggagaaggcctggatagctgtcatgtctgaagcagagagggtgagtgaactgcacctggaagtgaaggcatcactgatgaatgaagactttgagaagatcaagaactggcagaaggaagcctttcacaagcagatgatgggaggcttcaaggagaccaaagaagcagaggatggctttcggaaggcccagaagccctgggccaagaagctgaaagaggtggaagcggcaaagaaggcgcaccacacagcgtgcaaagaggagaagctggccatctcccgggaagccaacagcaaggcagatccatccctcaaccctgagcagctgaagaaactgcaagacaagatagaaaaatgcaaacaggacgttctaaagaccaaggacaagtatgagaagtccctgaaggagcttgatcagaccacaccccagtacatggagaacatggagcaggtgttcgagcagtgccagcagtttgaagagaagcgcctgcgcttcttccgggaggttctgctggaggttcagaagcacttggatctgtccaatgtggctagctataaaaccatttaccgggagctggagcagagcatcaaagcagcagatgcggtagaggacctgaggtggttccgggctaaccatgggccaggcatggctatgaactggccacagtttgaggagtggtctgcagatctgaatcgaactctcagccggagagagaagaagaaggctgttgacggtgtcaccctaacagggatcaaccagacaggtgaccagtctggacagaacaagcctggcagcaaccttagtgtcccgagcaaccccgcccagtccacgcagttacagtccagctacaaccccttcgaggacgaggacgacacgggcagcagcatcagtgagaaggaggacattaaggccaaaaatgtcagcagctatgagaagactcagacttaccccactgactggtctgatgatgagtctaacaaccctttctcctccacggatgccaacggggattcgaacccatttgatgaggacacgacctcaggaacagaagtgcgagttcgggccctctatgactatgaggggcaggaacatgatgagctgagcttcaaggctggggatgaactgaccaagatagaggatgaagatgaacagggttggtgcaagggacgtttagacagcggccaggttggcctatacccagccaactatgtcgaggctatccagtgacagcccatgggcaggctggcggagagacggaaatgggcagttcaggagctccgttagccttggcctgggcagtgacacctctagtgcccccagcagccatgtaggcatccactccacctgcaaaagacgatggctctgttgttcttggcttcctggtgtgctttgaaggcagatgagctggtgatttcattgggcacttggcccttttccaagcacatctgggcagatatagacacaggaagatagggtccaacagcgagagccaggcccctccccacccccaccagctctctctatcatggatctgcaccttctcgcccttgtctctcctgagtcatgacgggtcatactgattcttgttccactgatgattttctctgatgaggtcctatctgcaaggtcaatgagcagacttacatgccatcttctgagtaaagagtttgaggttttaatttaaaggcaatgtacagctatacttttttatatgctcttccagtcagttaaattatggcctacactgatctgagatgttctccacgtgagctgtcttcatttctctgtgctatgtccagatgtggggttgctgcagccggggttctatggcaagtgccagttgcagggctaaccttgtgcaacgttccccaacacttccacatacagaaattattttcactctatccctgcttcagtttttgcagattaacagttctattagtgatttggaaagttaacagtaagaagactaacttttcaaaacagttgcatctgtagattaagatgcttttacattagaccggttgtgtctcgatgtatatctgtatatattatttgataatcagaaaatctatagagttcacccactgttgaatgagagctggtggcttctgacagcagatctggtcaactgcttgaagcccatggcattgaagcacaggcacggctggttaacggtgcccacccagttaggatgtggctctggcctctgagtggagctgctgggaagactgattctcattggcctgggctccaagctcatgaccgagcactggaaaagctcctaggacttggtagtaatcgtagacttcacagtccctgtgtcactcactggagagctagagggaggggttcgacaccctccaccacacacacacacacacacacacacacacacacaagttcctccagttgcccttgtcctcaggtgcagtgggactgttgtgagccccagggatgggcacaaagaggacttttattttgttagctcggacagtgcagtggtgcacatcagcaacttgtatttcttcggtgtttggcacgagcactgtctcgctgtggctgtgtgtcatgagaacttaccagcagaaatccttgttcctaagctacagaatgaccaaaagctgtcaagtccttaatgtttagaaactccttaaaatgtatagtattttagaacaacaacaacaaaactcaataaacagttgatcttgtgtgtttgac

SEQ ID NO: 685 - protein, 486 aa, Homo sapiens
MSVTYDDSVGVEVSSDSFWEVGNYKRTVKRIDDGHRLCSDLMNCLHERARIEKAYAQQLTEWARRWRQLVEKGPQYGTVEKAWMAFMSEAERVSELHLEVKASLMNDDFEKIKNWQKEAFHKQMMGGFKETKEAEDGFRKAQKPWAKKLKEVEAAKKAHHAACKEEKLAISREANSKADPSFNPEQLKKLQDKIEKCKQDVLKTKEKYEKSLKELDQGTPQYMENMEQVFEQCQQFEEKRLRFFREVLLEVQKHLNLSNVAGYKAIYHDLEQSIRAADAVEDLRWFRANHGPGMAMNWPQFEEWSADLIRTLSRREKKKATDGFTLTGINQTGDQFLPSKPSSTLNVPSNPAQSAQSQSSYNPFEDEDDTGSTVSEKEDIKAKNVSSYEKTQSYPTDWSDDESNNPFSSTDANGDSNPFDDDATSGTEVRVRALYDYEGQEHDELSFKAGDELTKMEDEDEQGWCKGRLDNGQVGLYPANYVEAIQ

SEQ ID NO: 686 - DNA, 1571 bp, Homo sapiens
tgttaggttttattttaagtagaaataagtgtttgcatataggaaagttagttttcacttgtgttgattcttctgtttttaggatgccattggaggagaatctatgcctattccaactattgatacatcacgcaaaaagagactacccagtaaagaactaccagattcatcatctccagttccagcaaacaacatccgtgtcatcaaaaattccattcgactgacccttaatcggtaaaagcagtgcctcctcacttaagtgaacaagcaatcatttagtggcatagatgcagccacttgttttttaaatagaagtggctgtcatacgtgaaataaggtgaaagtgacagccttcagtctaataaccttgaagtggtttttgaactgtcaaactttgacctgtagatgctgtagcattctctcactgattgctacatacacttctctgaggatcacctgctgtcaaattgccatctacagtattacagctttgcatttgggggttttactgccttaactttcaatgcttgttatgggaaccagttcttagccacttggacactgataacaagtcctgaactccttttttttttttttttttgtgtttttctttttttgtcttatgttgtaatcattgtatagagctaaaaaaattgaaaacaaacaaaaaaattgtcttgtattttccaaatgttaatacatttactttagcattgaagccactttgaaacctgagataaatgaatgtgaggtatcttttctgctttcctcatttgtgtagatgtactgtctgttctgttgatttaaattatttttttccagattggcacatgaaatatttaaacttttttgtgtgcctttctgtccaaatgttgcatagttaccagggaagattagtccagtgattacataagagttgggcaccataaattctctatattttgcctcccatggaggcctttgaaatgcatctttattaaaaatcaaaatataaccaggatactgaaagtcagtatatgaatggtaaaattgttacatatcctatttcatgccattcttgttagttgactggtattttttactgaggagcaactcattccagcatcaacaataagataacctttaagtatggcacacttgtatttttgaggtgtaaaattaacttggcatgataattcctgatcattatttaccccacaacttcaaatagtttcttcacggactaggcatgcagaaataagcagtggattttattgaaacctaaaggcattttgaatgacattgttaccaaccattaattggctcaggacctttgtaatttttatttaactatatgagttgtctttttttacgctgcttttttcaatgcatttcttaatattttttaagtttcatgaatgcatgctcagtttattaaaatccataaccatgtaattcttgtaatatgttgattcagtgttttgtaaatgaagtcgtatgtattttcagagtatttttgtatgtactgtaagataccatcttttcaaagagaaacgtttaaaacctttaaaaaaaaaaaaaaaaaaaaaaaa

SEQ ID NO: 687 - protein, 73 aa, Homo sapiens
LGFILSRNKCLHIGKLVFTCVDSSVFRMPLEENLCLFQLLIHHAKRDYPVKNYQIHHLQFQQTTSVSSKIPFD

SEQ ID NO: 688 - DNA, 21 bp, Artificial Sequence
  PCR primer
cacgacgttgtaaaacgacgg

SEQ ID NO: 689 - DNA, 20 bp, Artificial Sequence
  PCR primer
cacaggaaacagctatgacc

SEQ ID NO: 690 - DNA, 5160 bp, Homo sapiens
atggtgccccctggtgtctacatgagaaatgccagctgtcatttccggaaggtcctgaacaagggttttcaaagctcccaagctctcagggtctgcaacaactactggattcgggagaaccccaatctgaacagtacccaggaggtgaatgagctgctgctgggaatggcctcccagatttcggagttggaggacaacatagtggttgaagatctgagggattactggcctggccctggcaaattctcccgtacagactatgtggccagcagcatccaacgtggccgagatatggggctgcccagctatagccaggccctgctggcctttgggctggacatcccaaggaactggagtgatctcaaccctaatgtggacccccaggtgctggaggccacagctgccctgtacaaccaggacctatcccagctagagctgctccttggcgggctcctggagagccatggggaccctggacccctgttcagtgccattgtcctcgaccagtttgtacggctgcgggatggtgaccgctactggtttgagaacaccaggaatgggctgttctccaagaaggagattgaagacatccgaaataccaccctgcgggacgtgctggtcgctgttatcaacattgaccccagtgccctgcagcccaatgtctttgtctggcataaaggtgcaccctgccctcaacctaagcagctcacaactgacggcctgccccagtgtgcacccctgactgtgcttgacttctttgaaggcagcagccctggttttgccatcaccatcattgctctctgctgccttcccttagtgagtctgcttctctctggagtggtggcctatttccggggccgagaacacaagaagctacaaaagaaactcaaagagagcgtgaagaaggaagcagccaaagatggagtgccagcgatggagtggccaggccccaaggagaggagcagtcccatcatcatccagctgctgtcagacaggtgtctgcaggtcctgaacaggcatctcactgtgctccgtgtggtccagctgcagcctctgcagcaggtcaacctcatcctgtccaacaaccgaggatgccgcaccctgctgctcaagatccctaaggagtatgacctggtgctgctgtttagttctgaagaggaacggggcgcctttgtgcagcagctatgggacttctgcgtgcgctgggctctgggcctccatgtggctgagatgagcgagaaggagctatttaggaaggctgtgacaaagcagcagcgggaacgcatcctggagatcttcttcagacacctttttgctcaggtgctggacatcaaccaggccgacgcagggaccctgcccctggactcctcccagaaggtgcgggaggccctgacctgcgagctgagcagggccgagtttgccgagtccctgggcctcaagccccaggacatgtttgtggagtccatgttctctctggctgacaaggatggcaatggctacctgtccttccgagagttcctggacatcctggtggtcttcatgaaaggctccccagaggataagtcccgtctaatgtttaccatgtatgacctggatgagaatggcttcctctccaaggacgaattcttcaccatgatgcgatccttcatcgagatctccaacaactgcctgtccaaggcccaactggccgaggtggtggagtctatgttccgggagtcgggattccaggacaaggaggagctgacatgggaggattttcacttcatgctgcgggaccatgacagcgagctccgcttcacgcagctctgtgtcaaaggtggaggtggaggtggaaatggtattagagatatctttaaacaaaacatcagctgtcgagtctcgttcatcactcggacacctggggagcgctcccacccccagggactggggccccctgccccagaagccccagagctgggaggccctggactgaagaagaggtttggcaaaaaggcagcagtgcccactccccggctgtacacagaggcgctgcaagagaagatgcagcgaggcttcctagcccaaaagctgcagcagtacaagcgcttcgtggagaactaccggaggcacatcgtgtgtgtggcaatcttctcggccatctgtgttggcgtgtttgcagatcgtgcttactactatggctttgccttgccaccctcggacattgcacagaccaccctcgtgggcatcatcctgtcacgaggcacggcggccagcgtctccttcatgttctcttatatcttgctcaccatgtgccgcaacctcataaccttcctgcgagagactttcctcaaccgctatgtgccttttgatgccgcagtggacttccaccgctggatcgccatggctgctgttgtcctggccattttgcacagtgctggccacgcagtcaatgtctacatcttctcagtcagcccactcagcctgctggcctgcatattccccaacgtctttgtgaatgatgggtccaagcttccccagaagttctattggtggttcttccagaccgtcccaggtatgacaggtgtgcttctgctcctggtcctggccatcatgtatgtcttcgcctcccaccacttccgccgccgcagcttccggggcttctggctgacccaccacctctacatcctgctctatgccctgctcatcatccatggcagctatgctctgatccagctgcccactttccacatctacttcctggtcccggcaatcatctatggaggtgacaagctggtgagcctgagccggaagaaggtggagatcagcgtggtgaaggcggagctgctgccctcaggagtgacctacctgcaattccagaggccccaaggctttgagtacaagtcaggacagtgggtgcggatcgcctgcctggctctggggaccaccgagtaccaccccttcacactgacctccgcgccccatgaggacacactcagcctgcacatccgggcagtggggccctggaccactcgcctcagggagatctactcatccccaaagggcaatggctgtgctggatacccaaagctgtaccttgatggaccgtttggagagggccatcaggagtggcataaatttgaggtgtcagtgttggtgggagggggcattggggtcaccccctttgcctccatcctcaaagacctggtcttcaagtcatccttgggcagccaaatgctgtgtaagaagatctacttcatctgggtgacacggacccagcgtcagtttgagtggctggctgacatcatccaagaggtggaggagaacgaccaccaggacctggtgtctgtgcacatttatgtcacccagctggctgagaagttcgacctcaggaccaccatgctatacatctgcgagcggcacttccagaaagtgctgaaccggagtctgttcacgggcctgcgctccatcacccactttggccgtccccccttcgagcccttcttcaactccctgcaggaggtccacccacaggtgcgcaagatcggggtgttcagctgcggccctccaggaatgaccaagaatgtagagaaggcctgtcagctcgtcaacaggcaggaccgagcccacttcatgcaccactatgagaacttctgagcctgtcctccctggctgctgcttccagtatcctgccttctcttctgtgcacctaagttgcccagccctgctggcaatctctccatcagaatccaccttaggcctcagctggagggctgcagagcccctcccaatattgggagaatattgacccagacaattatacaaatgagaaaaggcaggagactatgttctacaattgcagtgcatgatgattataagtccacctgtttatcaacggcaccattcctgcagccctccagacttcctgcccttagcaagtgcgcaaccagtcaggatctcccaaagaagataaagaccactcctcaccccagctcaagccatggcaggcgtggcaagcaaagtggggaggagacagtccctgcttgtgacaagtgtggaggtgaaaaggtacaatagtgcttgtctccgatagctccccacatctctaattgacttccacaaaatcgatgcgttgctttggtatttgcttggactgacatttgagggaggaggaggctgggatcctctggctgagaatctcctcagagcccagtgcagaagctgtgatgcttagaacctggacagcccgactgcctcaactctgtctccaggtctattccctccagctccaaaaggagcagccctacttctaccccttcccgtccccaaagtgtcagcaactttgaggagggcaccaggaaacaaagatgcctccccagccctgatattcttgatgtcaccagtgatacccactgccctgacccctgggcaggcccctctccgcatctactggagtggtccctgggctctggggctgaaggattccagcctctctgccagatattcagtactcgatctcaattcccctcttccacaagagttgggtgaccagctgtcctagtttgcccaggactctccctgttttagcactgaaagtctcttgccccaggaaaccccatcagtcccaggcagattgggacagctggtcaccttacgcaagagccaggctgaaacatcccctccatactcagctctttaacttttcttttcctttttcatcgggctctttcctaaaaagctgagctgtaaaatattttacatcgaggtataataaataatcatgtacatgttttaccaccacccaggtcaagacatagaatgtttcaacatttccatcaccccagaaactccccttgtacccccttccacttcgtctcccctagctcctagaagcaaccactgatgtgatttctaccaaatccagttttggtcctactaaatatactcttttgagactggcctcttttactcaccataatgcctttgtaattcatccatgctgttgtgtgtatcagcagtttgttccttttcattgctgagtagtattctattgtagagatgtaccacagtttgtttattcttctgttgatggacgtttgggttgtttctaattttgaatgattataaataaaaattctgtgagtgttcttgtacgtaaaaaaaaaaaaaaaaaaaaaaaaaaaa

SEQ ID NO: 691 - DNA, 2265 bp, Homo sapiens
atttgcctgtgtttagaagggtattactacaactcttctacatgtaagaaaggaaaggtattccctgggaagatttcagtgacagtatcagaaacatttgacccagaagagaaacattccatggcctatcaagacttgcatagtgaaattactagcttgtttaaagatgtatttggcacatctgtttatggacagactgtaattcttactgtaagcacatctctgtcaccaagatctgaaatgcgtgctgatgacaagtttgttaatgtaacaatagtaacaattttggcagaaaccacaagtgacaatgagaagactgtgactgagaaaattaataaagcaattagaagtagctcaagcaactttctaaactatgatttgacccttcggtgtgattattatggctgtaaccagactgcggatgactgcctcaatggtttagcatgcgattgcaaatctgacctgcaaaggcctaacccacagagccctttctgcgttgcttccagtctcaagtgtcctgatgcctgcaacgcacagcacaagcaatgcttaataaagaagagtggtggggcccctgagtgtgcgtgcgtgcccggctaccaggaagatgctaatgggaactgccaaaagtgtgcatttggctacagtggactcgactgtaaggacaaatttcagctgatcctcactattgtgggcaccatcgctggcattgtcattctcagcatgataattgcattgattgtcacagcaagatcaaataacaaaacgaagcatattgaagaagagaacttgattgacgaagactttcaaaatctaaaactgcggtcgacaggcttcaccaatcttggagcagaagggagcgtctttcctaaggtcaggataacggcctccagagacagccagatgcaaaatccctattcaagacacagcagcatgccccgccctgactattagaatcataagaatgtggaacccgccatggcccccaaccaatgtacaagctattatttagagtgtttagaaagactgatggagaagtgagcaccagtaaagatctggcctccggggtttttcttccatctgacatctgccagcctctctgaatggaagttgtgaatgtttgcaacgaatccagctcacttgctaaataagaatctatgacattaaatgtagtagatgctattagcgcttgtcagagaggtggttttcttcaatcagtacaaagtactgagacaatggttagggttgttttcttaattcttttcctggtagggcaacaagaaccatttccaatctagaggaaagctccccagcattgcttgctcctgggcaaacattgctcttgagttaagtgacctaattcccctgggagacatacgcatcaactgtggaggtccgaggggatgagaagggatacccaccatctttcaagggtcacaagctcactctctgacaagtcagaatagggacactgcttctatccctccaatggagagattctggcaacctttgaacagcccagagcttgcaacctagcctcacccaagaagactggaaagagacatatctctcagctttttcaggaggcgtgcctgggaatccaggaactttttgatgctaattagaaggcctggactaaaaatgtccactatggggtgcactctacagtttttgaaatgctaggaggcagaaggggcagagagtaaaaaacatgacctggtagaaggaagagaggcaaaggaaactgggtggggaggatcaattagagaggaggcacctgggatccaccttcttccttaggtcccctcctccatcagcaaaggagcacttctctaatcatgccctcccgaagactggctgggagaaggtttaaaaacaaaaaatccaggagtaagagccttaggtcagtttgaaattggagacaaactgtctggcaaagggtgcgagagggagcttgtgctcaggagtccagccgtccagcctcggggtgtaggtttctgaggtgtgccattggggcctcagccttctctggtgacagaggctcagctgtggccaccaacacacaaccacacacacacaaccacacacacaaatgggggcaaccacatccagtacaagcttttacaaatgttattagtgtccttttttatttctaatgccttgtcctcttaaaagttattttatttgttattattatttgttcttgactgttaattgtgaatggtaatgcaataaagtgcctttgttaaaaaaaaaaaaaaaaaa

SEQ ID NO: 692 - protein, 1210 aa, Homo sapiens
MVPPGVYMRNASCHFRKVLNKGFQSSQALRVCNNYWIRENPNLNSTQEVNELLLGMASQISELEDNIVVEDLRDYWPGPGKFSRTDYVASSIQRGRDMGLPSYSQALLAFGLDIPRNWSDLNPNVDPQVLEATAALYNQDLSQLELLLGGLLESHGDPGPLFSAIVLDQFVRLRDGDRYWFENTRNGLFSKKEIEDIRNTTLRDVLVAVINIDPSALQPNVFVWHKGAPCPQPKQLTTDGLPQCAPLTVLDFFEGSSPGFAITIIALCCLPLVSLLLSGVVAYFRGREHKKLQKKLKESVKKEAAKDGVPAMEWPGPKERSSPIIIQLLSDRCLQVLNRHLTVLRVVQLQPLQQVNLILSNNRGCRTLLLKIPKEYDLVLLFSSEEERGAFVQQLWDFCVRWALGLHVAEMSEKELFRKAVTKQQRERILEIFFRHLFAQVLDINQADAGTLPLDSSQKVREALTCELSRAEFAESLGLKPQDMFVESMFSLADKDGNGYLSFREFLDILVVFMKGSPEDKSRLMFTMYDLDENGFLSKDEFFTMMRSFIEISNNCLSKAQLAEVVESMFRESGFQDKEELTWEDFHFMLRDHDSELRFTQLCVKGGGGGGNGIRDIFKQNISCRVSFITRTPGERSHPQGLGPPAPEAPELGGPGLKKRFGKKAAVPTPRLYTEALQEKMQRGFLAQKLQQYKRFVENYRRHIVCVAIFSAICVGVFADRAYYYGFALPPSDIAQTTLVGIILSRGTAASVSFMFSYILLTMCRNLITFLRETFLNRYVPFDAAVDFHRWIAMAAVVLAILHSAGHAVNVYIFSVSPLSLLACIFPNVFVNDGSKLPQKFYWWFFQTVPGMTGVLLLLVLAIMYVFASHHFRRRSFRGFWLTHHLYILLYALLIIHGSYALIQLPTFHIYFLVPAIIYGGDKLVSLSRKKVEISVVKAELLPSGVTYLQFQRPQGFEYKSGQWVRIACLALGTTEYHPFTLTSAPHEDTLSLHIRAVGPWTTRLREIYSSPKGNGCAGYPKLYLDGPFGEGHQEWHKFEVSVLVGGGIGVTPFASILKDLVFKSSLGSQMLCKKIYFIWVTRTQRQFEWLADIIQEVEENDHQDLVSVHIYVTQLAEKFDLRTTMLYICERHFQKVLNRSLFTGLRSITHFGRPPFEPFFNSLQEVHPQVRKIGVFSCGPPGMTKNVEKACQLVNRQDRAHFMHHYENF

SEQ ID NO: 693 - protein, 277 aa, Homo sapiens
MAYQDLHSEITSLFKDVFGTSVYGQTVILTVSTSLSPRSEMRADDKFVNVTIVTILAETTSDNEKTVTEKINKAIRSSSSNFLNYDLTLRCDYYGCNQTADDCLNGLACDCKSDLQRPNPQSPFCVASSLKCPDACNAQHKQCLIKKSGGAPECACVPGYQEDANGNCQKCAFGYSGLDCKDKFQLILTIVGTIAGIVILSMIIALIVTARSNNKTKHIEEENLIDEDFQNLKLRSTGFTNLGAEGSVFPKVRITASRDSQMQNPYSRHSSMPRPDY

SEQ ID NO: 694 - DNA, 157 bp, Homo sapiens
aaatataaatgatatgttgaaaacttaaggaagcaaatgctacatatatgcaatataaaatagtaatgtgatgctgatgctgttaaccaaagggcagaataaataagcaaaatgccaaaaggggtcttaattgaaatgaaaatttaattttgttttt

SEQ ID NO: 695 - DNA, 241 bp, Homo sapiens
ctggcccgacctctggcctcctcttccctggctgaatgtaaatatttaccagcatttagaaaaaaggagaaaaaagacagaactaaacccgtttaggaaaaagggaccgagggacagcagtggttaagtaatccactgaggacctgaaggggaaaatggacttacctttctcatatacttggcctggctaggacactgggtgccagacagccttctgaggggattttctttctaaatgagg

SEQ ID NO: 696 - DNA, 188 bp, Homo sapiens
  misc_feature 11, 29, 30, 59, 62, 165: n = A,T,C or G
gcccatgatgncagagctggaagagaggnnacgtcagcagaggggccacctccatttgntgnagacaagcatagatgggattctggctgatgtgaagaacttggagaacattagggacaacctgcccccaggctgctacaatacccaggctcttgagcaacagtnaagctgccataaatatttctcaa

SEQ ID NO: 697 - DNA, 289 bp, Homo sapiens
  misc_feature 50, 86, 207: n = A,T,C or G
ctgcttggacttcaaagccctccgcctagccatctcagccaggctcaggntccttctcccacccatcaggccaagcaggacttgtnaaacatacacattcaagttcctagcacacagtaggtgctaagtgggaattgattataaacttgaattcttccatcaacaaatatctacctctcctgtccagcttgcctcagatcttcaggntctctcttctctgaggcagctaagcttctacatccttcatgaagtttcctttacttctcgacagaagacagttccctttagg

SEQ ID NO: 698 - DNA, 193 bp, Homo sapiens
  misc_feature 171: n = A,T,C or G
aaagtttgtgctataaaattgtgcaaatatgttaaggattgagacccaccaatgcactactgtaatatttcgcttcctaaatttcttccacctacagataatagacaacaagtctgagaaactaaggctaaccaaacttagatataaatcctaccaataaaatttttcagntttaagttttacagtttgattt

SEQ ID NO: 699 - DNA, 279 bp, Homo sapiens
  misc_feature 60, 126: n = A,T,C or G
ccttccccccccttccttatgagttctaacttagtaatttcaaatgtgaccttttatatntaagaccagtatagtaaacttagcccacagtggcaaataatgagtaatattgtaatatgttccagngggataccctccttgtcttgaattttggctttgacattctcaatggtgtcactgggctcgacctcaagggtgatggttttgccagtgagggtcttcacaaagatctgcatgtttgcgtccgcacgaccgccgccaccaaccagctcggccgcc

SEQ ID NO: 700 - DNA, 340 bp, Homo sapiens
  misc_feature 174: n = A,T,C or G
ctgtccaatgacaacaggaccctcactctactcagtgtcacaaggaatgatgtaggaccctatgagtgtggaatccagaacaaattaagtgttgaccacagcgacccagtcatcctgaatgtcctctatggcccagacgaccccaccatttccccctcatacacctattaccgnccaggggtgaacctcagcctctcctgccatgcagcctctaacccacctgcacagtattcttggctgattgatgggaacatccagcaacacacacaagagctctttatctccaacatcactgagaagaacagcggactctatacctgccaggccaataactcagcca

SEQ ID NO: 701 - DNA, 277 bp, Homo sapiens
  misc_feature 13, 29, 109, 117, 182: n = A,T,C or G
ccactggctgagntattggcctggcaggnatagagtccgctgttcttctcagtgatgttggagataaagagctcttgtgtgtgttgctggatgttcccatcaatcagcnaagaatantgtgcaggtgggttagaggctgcatggcaggagaggctgaggttcacccctggacggtaataggngtatgagggggaaatggtggggtcgtctgggccatagaggacattcaggatgactgggtcgctgtggtcaacacttaatttgttctggattccac

SEQ ID NO: 702 - DNA, 255 bp, Homo sapiens
  misc_feature 27, 42, 86: n = A,T,C or G
ctgcgcgtcgccaaagtgacaggcggngcggcctccaagctntctaagatccgagtcgtccggaaatccattgcccgtgttctcanagttattaaccagactcagaaagaaaacctcaggaaattctacaagggcaagaagtacaagcccctggacctgcggcctaagaagacacgtgccatgcgccgccggctcaacaagcacgaggagaacctgaagaccaagaagcagcagcggaaggagcggctgtacccg

SEQ ID NO: 703 - DNA, 224 bp, Homo sapiens
  misc_feature 13, 42, 43, 74, 89, 179, 210, 216: n = A,T,C or G
cctgtttggaggngctgctcgaaagggtttgccctgagactnnaagaagaagctgcgggaaggacagcaggggncctggggttttagcntctggcccaggagttatgtgtccataaccaaagggagcacagtctgcacccagctctcatcccatcggagctgctgcgactcccgcaggntcttccggaactggtttagcttgcccgcagnatcagnaaagtttg

SEQ ID NO: 704 - DNA, 445 bp, Homo sapiens
  misc_feature 251, 313, 392, 427: n = A,T,C or G
aggtaaaaagcagcctgggcaagagaagtgggtgggtttaggagaatccctttcgaaaaattcagagcattattattaatccttcttaaattaaatgcagggccaagcatgctgcacgtggaatctggacaattttttgataaactttaaggctgctaaataatttacagaaactgtgaatgcattttcattttacgaggcaaaagagaaaatattcaagattgcatagcaattttattttttgaaatggntatcctaaagaatttccttaaattcagattttgcaaaattcctactctccaagtcatcaagngaacactaaaagcaactttactcgtgaatacaggggactctttacgaggcatgcatttttcataaatctaggccaaagngaactaattgagatttaattctaaattcatcctgngatttctgcatataatat

SEQ ID NO: 705 - DNA, 107 bp, Homo sapiens
  misc_feature 8, 29, 32, 46, 47, 54, 62, 70, 91, 102, 103: n = A,T,C or G
atcacccnatttaattaaaaatccctggnctnaggacctacagcanngtactgnagaacttnagaacctnaattagccatttgccatcttnagagagtcttnnccat

SEQ ID NO: 706 - DNA, 113 bp, Homo sapiens
  misc_feature 22, 105: n = A,T,C or G
aaatagtttctaaaggcaaggncttgctatgttgcttaggctggttttgaaaagtcccttttggggggatgctttcactgcttcacttcctttctatgacagctnagggaatc

SEQ ID NO: 707 - DNA, 283 bp, Homo sapiens
  misc_feature 47, 127, 132, 135, 159, 208, 221, 223, 236, 276: n = A,T,C or G
ctgctccaaggccatcaagatcttcatggggaggacggagctgaagntggaagacaagcaccgtgtggtgatccagcgtgatgagggtcaccacgtggcctacaccacgcgggaggtgggccagtanctggnggnggagtccagcacgggcatcatcgncatctgggacaagaggaccaccgtgttcatcaagctggctccctcctanaagggcaccgtgngnggcctgtgtgggnactttgaccaccgctccaacaacgacttcaccacgcgggnccacatg

SEQ ID NO: 708 - DNA, 341 bp, Homo sapiens
  misc_feature 182: n = A,T,C or G
ctgtccaatgacaacaggaccctcactctactcagtgtcacaaggaatgatgtaggaccctatgagtgtggaatccagaacaaattaagtgttgaccacagcgacccagtcatcctgaatgtcctctatggcccagacgaccccaccatttccccctcatacacctattaccgtccaggggngaacctcagcctctcctgccatgcagcctctaacccacctgcacagtattcttggctgattgatgggaacatccagcaacacacacaagagctctttatctccaacatcactgagaagaacagcggactctatacctgccaggccaataactcagccag

SEQ ID NO: 709 - DNA, 376 bp, Homo sapiens
  misc_feature 62, 110, 115, 116, 155, 167, 203, 218, 286, 320, 328, 337: n = A,T,C or G
ccaagtccaggggcgtggaggccgcccgggagcggatgttcaatggtgagaagatcaactanaccgagggtcgagccgtgctgcacgtggctctgcggaaccggtcaaanacacnnatcctggtagacggcaaggatgtgatgccagaggtcaanaaggttctgganaagatgaagtctttctgccagcgtgtccggagcggngactggaaggggtanacaggcaagaccatcacggacgtcatcaacattggcattggcggctccgacctgggacccctcatggngactgaagcccttaagtcatactcttcaggaggnccccgcgnctgggatgnctccaacattgatggaactcacattgccaaaaccctggc

SEQ ID NO: 710 - DNA, 232 bp, Homo sapiens
  misc_feature 42, 52, 62, 79, 83, 106, 134: n = A,T,C or G
ctgctgtatattcagcattgtgggaggagctgtgaaagacanagaacagtanagggtgtggnccctgccctcgagaggnttanagtctaggtggagaaacgggaancaggacacatggggagccgagagaaaanagtccaggccagtatgttacaggagctggaaggtgtttggggtcagaccccaatactccaagtacactaagcacttcagtgcctccaggggctcaacg

SEQ ID NO: 711 - DNA, 317 bp, Homo sapiens
  misc_feature 227: n = A,T,C or G
caggtaaaatagatttaatttaggaaagctcattttatatgagtttccaactaattattagagtcagaaacaaagaaaataaaatcagagaaaatcctctgtagaaaaaatacacaaagaacatttctacatgtgaaaaaacagtaaacagtgttaacatccaagttattagtctcaattccacgtctcctagtgaacaccactatcaaccttgagatctgatttgntcttgtcattcttcactgagtagatgaaatatgttaaggtgtctttttcattcactggaatagacctaaagtggcaaccaactatctcaa

SEQ ID NO: 712 - DNA, 154 bp, Homo sapiens
  misc_feature 2, 16, 30, 33, 55, 108, 130: n = A,T,C or G
tntgtagaaaaaatanacaaagaacatttntanatgtgaaaaaacagtaaacagngttaacatccaagttattagtctcaattccacgtctcctagtgaacaccactntcaaccttgagatctgatttgntcttgtcattcttcactgagtaga

SEQ ID NO: 713 - DNA, 177 bp, Homo sapiens
  misc_feature 102, 129: n = A,T,C or G
ccattcagaggtagaagatggaggggcggcagattctggcagggcagcagagggctctatgcacgggtttcaaacctgttttccacactctgtctttgcagntttggtaattctgtggtctatttatanagatattaaaatcttgtttataaaaaaaaaaaaaaaaaaaaaaaaaaa

SEQ ID NO: 714 - DNA, 216 bp, Homo sapiens
  misc_feature 46, 88, 200: n = A,T,C or G
ctgtgtttcggctataaaaaggcggctgaaagaaggggaaaattantttagacttaattggaagtttcatatggcacacattaccagnagagaaaaagatataaacggcaataaatattaggctcgatttgagaaactctccccacctcaatgctttcttttcccttgctatttaagggtctactttgcaacccgtgtgngtgtttgtgtgtgtgt

SEQ ID NO: 715 - DNA, 376 bp, Homo sapiens
  misc_feature 211, 294, 333, 352: n = A,T,C or G
ctgtgcgagtgtaccggatgcttccacctctcaccaagaaccagagaaaagaaagaaagtcgaagtccagccgagatgctaagagcaaggccaagaggaagtcatgtggggattccagccctgataccttctctgatggactcagcagctccactctgcctgatgaccacagcagctacacagttccaggctacatgcaggacttggaggnggagcaggccctgactccagctacaacagatgaggatgaggaagggaaattacctgaggacatcatgaagctcttggagcagncggagtggcagccaacaagcgtggatgggaaggggtacntactcaatgaacctggagnccagcccacctctgtctatggaga

SEQ ID NO: 716 - DNA, 96 bp, Homo sapiens
  misc_feature 59, 74, 77: n = A,T,C or G
aaactttttatttgcatattaaaaaaattgtgcattccaataattaaaatcatttgaanaaaaaaaaaatggcnctntgattaaactgcattacag

SEQ ID NO: 717 - DNA, 366 bp, Homo sapiens
  misc_feature 104, 224, 233, 343: n = A,T,C or G
gatggaaaggatacagatgacatcaagatccccatgctgttcttattcagcaaagaaggaagtatcatactggatgccatccgggaatatgaggaggtagaagngctcctctctgataaagcaaaagatcgagatcctgaaatggaaaatgaagaacaaccatcctctgaaaatgattctcagaatcagagtggtgaacagatttcatcaagttctcaggaggntgatttggntgatcaagagtcttctgaggaaaattctctaaattctcacccagaatcattatctctagcagatatggacaatgctgcaagcatttccccttctgaacagacttctaatnccacagaaaaccatgagactaca

SEQ ID NO: 718 - DNA, 200 bp, Homo sapiens
  misc_feature 17: n = A,T,C or G
aaacatctcacatatanaaaataggtacaatttaatttttctgcttgcccaagaaacaaagcttctgtggaaccatggaagaagatgaaaatgagactggcaaagaacaaatgctgaatctgaagaagatttgggcaaataatctgcatacttttaattgggaataagatggaaaatatgaatgctaaatcaaatttttt

SEQ ID NO: 719 - DNA, 336 bp, Homo sapiens
  misc_feature 71, 260, 314: n = A,T,C or G
ctgtctcacactttgcaagctgtgagagacacatcagagccctgggcactgtcactgcttgcagcctgagngtaactccctccttttctatctgagctcttcctcctccacatcacggcagcgaccacagctccagtgatcacagctccaaggagaaccaggccagcaatgatgcccacgatggggatggtgggctgggaagacagctcccatctcagggtgaggggcttgggcagaccctcatgctgcacatggcaggngtatctctgctcctctccagaaggcaccaccacagccgcccacttctggaaggntccatccccttgcaggccttgg

SEQ ID NO: 720 - DNA, 167 bp, Homo sapiens
  misc_feature 31, 46, 47: n = A,T,C or G
ggagagtgctagtgaggcggccaagaagtanatggaggagaatgannagctcaagaagggagctgctgttgacggaggcaagttggatgtcgggaatgctgaggtgaagttggaggaagagaacaggagcctgaaggctgacctgcagaagctaaaggacgagctgg

SEQ ID NO: 721 - DNA, 134 bp, Homo sapiens
  misc_feature 39, 56, 102: n = A,T,C or G
cctagtatgaggagcgttatggagtggaagtgaaatcanatggctaggccggaggncattaggagggctgagagggcccctgttaggggtcatgggctgggntttacgtgcgtgaggaggggcggagcttgcag

SEQ ID NO: 722 - DNA, 353 bp, Homo sapiens
  misc_feature 214, 290, 299: n = A,T,C or G
aaaaatatatacaactatgatgttcaaatatgtattctgagccattatgttcaaacataaatatctgggaaattcaaactgctgcaacaagttaggaaaggattaaggaaaaatgatgagctacaaattatgtagttggaggaagaaaaaaatgttacttagcatttatgtctggataggtatgtattttctaatttacatacacatatccagntgagtatagacaaccatcaaaatgtaaccagttacacagagactagactaagccaacactattttctataacaggnaacagtagngatttcaaaaattttaatatctcaatagtttcaccaaaaattatttatgggaat

SEQ ID NO: 723 - DNA, 268 bp, Homo sapiens
  misc_feature 67, 124, 156, 208, 241, 261: n = A,T,C or G
ctgagaagagcgccaggaagccctgggtgcgagagttgatgacgtcgatctcgtgcagggacacggngtgcaccacctccttgcgtttctggagctccccatctgggcactgcacgaacttggnctgggagcccatagcgtcgtagtcgcgggcgngtgtgaaggagcggcccaacttggagatcttgcccgtcgccttgtcgatggngatcacgtccccggcctggaccttgtccttggncagggactcaatcatcttgntgcccag

SEQ ID NO: 724 - DNA, 344 bp, Homo sapiens
  misc_feature 63, 191, 201: n = A,T,C or G
aaagaatcagcaaaatttcaaataaaaaattatgaaaatattatcctcattagttcatttagncccatgaaattaattattttctctgctcgatcttggtggacagtttcatgaagctgtcagttagttcattaaagttttggaaattctcagacagtgcagtggtatcagaaacttgtattcaagagtanaggtcagagncttcttttcttttctttttgagatggagtcttgctctgttgccagactggagtgcagtggtgcgatctgggctcactgcaatctccacctcccgggttcaagcgattctcctgcctcagcctcccgagtaactgggactacag

SEQ ID NO: 725 - DNA, 345 bp, Homo sapiens
  misc_feature 32, 90, 179, 223, 306, 339, 340: n = A,T,C or G
aaacaagagaaagtagacagatacatgttggnaaatgctaactgtccatattcacatagagacacagtgtactctctgagcccaatatanagagaaaggaggaaaaaagctagaattctatgcactactacacaggggcctagcaccctccagcttccagcagagcgaagggagcaggnttttcttttttcccacagagctcggggggttgattccatacagnttttgttcagacaggaagggataaaaatgaacttcgaacagaaaggggtagagactcttttcccattgtattctgctcaaggnatttccccccaaataaattgagaaccatggagnngagaa

SEQ ID NO: 726 - DNA, 305 bp, Homo sapiens
  misc_feature 112, 118, 187, 284: n = A,T,C or G
ttgcctgatgtcagagcccctccacacatgagcctgctccctactgccaacaccgtggcccagacagagacgctttccgaggaagaggtgaagctcctgcagtcgctgaagnaagganagcagatcgtgaggaaaaagggcgccgaggttgggggcatgtctctcttcttaccaagctagactgggntgccttttctaactattccagccctacagggcgaggggccataatggagtatcccgcccctttagaccccaggcgctcaccggcagggcaagaaggngaaatccagcagccgcgccag

SEQ ID NO: 727 - DNA, 387 bp, Homo sapiens
  misc_feature 131, 151: n = A,T,C or G
ccaacgaggcatcacctctgacggtgtcagtcatcgatgaccggctcaaggagaagatggtggtggagttccgccacatgaggaaccatgcctatgagccactcgccagcttcctagacttcattacttanagttacatgatcgacaacgngatcctgctcatcacaggcacgctgcaccagcgctccatcgctgagctcgtgcccaagtgccacccactaggcagcttcgagcagatggaggccgtgaacattgctcagacacctgctgagctctacaatgccattctggtggacacgcctcttgcggcttttttccaggactgcatttcagagcaggaccttaacgagatgaacatcgagatcatccgcaacaccctctacaagg

SEQ ID NO: 728 - DNA, 109 bp, Homo sapiens
ctgactgacagccagattgcagatgtggctcgcttttgtaaccgctaccctaatatcgaactatcttatgaggtggtagataaggacagcatccgcagtggcgggccag

SEQ ID NO: 729 - DNA, 329 bp, Homo sapiens
  misc_feature 247, 281, 304: n = A,T,C or G
aaagcataggactatagtcagcatgctagactgagaggtaaacactgatgcaattagaacaggtactgatgctgtcagtgtttaacactatgtttagctgtgtttatgctataaaagtgcaatattagacactagctagtactgctgcctcatgtaactccaaagaaaacaggatttcattaagtgcattgaatgtggctatttctctaagttactcatattgtcctttgcttgaatgcaatgccgngcagatttatgtggctgctatttttattttctgngcattactttaacaccttaaagngagaagcaaacatttccttcttcag

SEQ ID NO: 730 - DNA, 238 bp, Homo sapiens
  misc_feature 67, 204: n = A,T,C or G
aaaaagtggcagagtgacttaactgatcatgcatgatccctcatccctgaaattgagtttatgtagncattttacttattttattcattagctaactttgtctatgtatatttctagatattgattagtgtaatcgattataaaggatatttatcaaatccagggattgcattttgaaattataattattttctttgctgaagnattcattgtaaaacatacaaaataaacatatttt

SEQ ID NO: 731 - DNA, 297 bp, Homo sapiens
  misc_feature 202, 254: n = A,T,C or G
aaactgaattttttgaccttggaaaatatttttcttactttaccaaggtgaagtttccttaattagactaattattttatccccatcccagggtataaacaggaattgttttgatagtggtggagttattcactgcaacaaagcaacaatgttgtccatgattcaaaatctaagcagtttcgattttgcctgtgaatatggngtctgtcattcagggcatagctcactgtaggctagcctctgcttacttaagnctcttctctgacatactcaatggaagaatatttagatttattt

SEQ ID NO: 732 - DNA, 370 bp, Homo sapiens
  misc_feature 88, 104, 131, 184: n = A,T,C or G
ctgtcagtcttcctgaaatgaagaaactacaccagggctgctatatcagagcaaccccaaccagcactccaatcatgatgccgacagnggccccaattagaagntcaaaaacaaaaattaagttaggtagncagacatctataaatactagtatccgcatgaatgaaaacaccctggctttggnatggctacagaaatccatctggaaattattcaaaaggacgtggttcagggaaaagggggtaggcagggcatggggggaggggaacacacaaaacccccaagcagaggtaaaatgaatattggaacacacccgcagcaaacactgtacatagacttgaggcagatgcctctaacacaacacatatac

SEQ ID NO: 733 - DNA, 242 bp, Homo sapiens
  misc_feature 129: n = A,T,C or G
cctcctatttattctagccacctctagcctagccgtttactcaatcctctgatcagggtgagcatcaaactcaaactacgccctgatcggcgcactgcgagcagtagcccaagcaatctcatatgaagncaccctagccatcattctactatcaacattactaataagtggctcctttaacctctccacccttatcacaacacaagaacacctctgattactcctgccatcatgacccttgg

SEQ ID NO: 734 - DNA, 368 bp, Homo sapiens
  misc_feature 154, 188, 311: n = A,T,C or G
cctttcttgtaagtgaagaaaaaggaatgcagcaaagaagagttcgacattggagtccttagttccatcaggatcccattcgcagcctttagcatcatgtagaagcaaactgcacctatggctgagataggtgcaatgacctacaagattttgngttttctagctgtccaggaaaagccatcttcagncttgctgacagtcaaagagcaagtgaaaccatttccagcctaaactacataaaagcagccgaaccaatgattaaagacctctaaggctccataatcatcattaaatatgcccaaactcattgngactttttattttatatacaggattaaaatcaacattaaatcatcttatttacatgg

SEQ ID NO: 735 - DNA, 308 bp, Homo sapiens
  misc_feature 92, 101, 120, 216, 279: n = A,T,C or G
ctgtccaataggcgtagctatccggacagagcacgtttgcagaagggggactcttcttccaggtagctgaaaggggaagacctgacgtactntggttaggntaggacttgccctcgtggnggaaacttttcttaaaaagttataaccaacttttctattaaaagtgggaattaggagagaaggtaggggttgggaatcagagagaatggctttggnctcttgcttgtgggactagcctggcttgggactaaatgccctgctctgaacacgaagcttagnataaactgatggatatccctaccttgaaa

SEQ ID NO: 736 - DNA, 354 bp, Homo sapiens
  misc_feature 57: n = A,T,C or G
ccttctgctacgtagtctacaacagaaggattcaggcaattacctctgccatgcggnggaacatgggttcatacaaactcttcttaaggtaaccctggaagtcattgacacagagcatttggaagaacttcttcataaagatgatgatggagatggctctaagaccaaagaaatgtccaatagcatgacacctagccagaaggtctggtacagagacttcatgcagctcatcaaccaccccaatctcaacacgatggatgagttctgtgaacaagtttggaaaagggaccgaaaacaacgtcggcaaaggccaggacataccccagggaacagtaacaaatggaagcacttaca

SEQ ID NO: 737 - DNA, 198 bp, Homo sapiens
  misc_feature 59, 184: n = A,T,C or G
ctgccgctgcacacgctcgttcttctctgcctcagtgatgcgcttctcctcattgcggncatcccggatgccctcactagacagctccgcgctgtagcccgtgggctctgcgccctcatcctgcaagctctcctggacatggtagctcaccggctcgtacacggggggtggtgggggcgggggngctgtcatcaccag

SEQ ID NO: 738 - DNA, 228 bp, Homo sapiens
  misc_feature 36, 93, 202, 221: n = A,T,C or G
gtgccatggcacacagcctgggtgcacacccagcgncctctcttgcaggtgcaggtattgcagtccaccttgatcttggcgccggaagaatanaggtcgttgttatggacgcaagggcattccttctccaccacgcagccaccccggccgtcatccatcagcccgtcggggcacacacagccactgacacactctgtgtggnaatagccggcggccagcgnctggcag

SEQ ID NO: 739 - DNA, 378 bp, Homo sapiens
  misc_feature 124, 136, 169, 200, 230, 233, 247, 332, 339: n = A,T,C or G
aaaaaatacaggagtcgatagcagcagttggtgacgagatggcactcagaaacggcgttgacgtaatttaggacgtggaatcataagcgaaacagcacactgtttgaataaagagcgagtcggnatttatatttgnttttcttttgtcatgattatttgatttttaagntgctccagctaaggcatttttttgtattagnatttctattagggaacctttcttattaggnggnttgtattgtctggnttctaacatgcaggtagctgtttggcagttaaacacgtttagagtaatttgagttacaacgtgtgaaactgagcaaaaaagcagngataagnttgggttaccataccaaatatttgttttcccactggaaa

SEQ ID NO: 740 - DNA, 200 bp, Homo sapiens
  misc_feature 13, 95: n = A,T,C or G
ccacttgagtggntcctggctgcttctgtgattgttaggtcttgagagattatggacccgaggcattctgggtaccccatcaattggctgatggncttctatttgggctgcgcttcttctaaaaaggggagctcaaaggtctttttttcccccactgcagagctaaaaaagtccctgtacgccatcttctcccagtttgg

SEQ ID NO: 741 - DNA, 273 bp, Homo sapiens
ctgcttggcatcgtaatgggccggtggcatcatgagccccagaatcagccttgccaggtctccagagatctcagacttcaggtcagtcattaagtcccggccaaagtgagacttgaaggtctgccggatctgctgccgctggacattgctgcggtgcgtgatgatatcgatgattgtgtcttcgtcagtcccgagtcccttcatggctttccgcagcgctttggcatctgcgtcagggttgaagtcattggctgggcgcacaggtcccttcag

SEQ ID NO: 742 - DNA, 297 bp, Homo sapiens
  misc_feature 89, 188, 264, 266: n = A,T,C or G
ctgcagttgctccctttagggttataaaataatgacccaaatgttacatgtgttgatattataacttgtcagttactgatgtctgtggnatcctaccctcatctctgaaagggataatactgaataattattagaaaactataaaacttcacactttgtaccattaaaacctaaaattttaatcttgnccttttttactatggatcagtcggcactcgggaacagcagcaaggaaaagaggcaaatttcattcacatgttctgngntcatacctcttctctacctaattgttcattt

SEQ ID NO: 743 - DNA, 381 bp, Homo sapiens
  misc_feature 240, 243, 252, 291, 305, 321, 324, 327, 342: n = A,T,C or G
ctgcacctccacctccttgaagttgaagatactattgccatcaaagccagcagccagctctggacagtatgcctgcagggaacctccatgccggctcagtgacacactctctgcagccagggtaatgaacttgtcctcagctacaaaagctgtgagcttggctgtgctcacctccagggttaggtttagcagccgctttgggggtaatggctcaggggcacggccttctagctcagaagnagntcctgaagnctctagtgcaagggatggtacagtctcaggaaacacagnggctcttagtaggnctcggcactgtagagnggnggnatccccagagctggngatgatttggttgtcatccaggaagcggcaacacgacag

SEQ ID NO: 744 - DNA, 167 bp, Homo sapiens
  misc_feature 6, 78: n = A,T,C or G
cagcgnggggctcggagaggtgctcggattctcgtagctgtgccgggacttaaccaccaccatgtcgagcaaaagaanaaagaccaagaccaagaagcgccctcagcgtgcaacatccaatgtgtttgctatgtttgaccagtcacagattcaggagttcaaagagg

SEQ ID NO: 745 - DNA, 96 bp, Homo sapiens
ccacaaactcctctggctgtactccctcctgcaggagaccggcctcactgcactcagcaggctcttctccctgcgattcacttctgggacagtcac

SEQ ID NO: 746 - DNA, 391 bp, Homo sapiens
  misc_feature 257: n = A,T,C or G
ccattacgcagccgcttcagcaaacagggctcctcccggcccgagggcgggaccacagtggccgtcagcaggctgagatccgtctctgagatgttgatggggatgtcggcagcagagccgacctttaggtgggacatacgcatggagtcgtcacctgtgacccgggcagtgaaggggctgcctgggacgtgctgttcattgtacttgactagaatgctgtagtcccccggcagcacaggcaagtaggacacgctgcnatgtcccatcctggttgtcagtgcagtgttgcttgttcagtatctcaagcccagaaagatgaattaatccttgaaggaaatgacattgagcttgtttcaaattcagcggctttgattcagcaagccacaacagt

SEQ ID NO: 747 - DNA, 408 bp, Homo sapiens
  misc_feature 71, 233, 367: n = A,T,C or G
aaagttgtttgtgcctttttatttttgtttttaatgctttgatatttcaatgttagcctcaatttctgaanaccataggtagaatgtaaagcttgtctgatcgttcaaagcatgaaatggatacttatatggaaattctgctcagatagaatgacagtccgtcaaaacagattgcttgcaaaggggaggcatcagtgtccttggcaggctgatttctaggtaggaaatgtggnagcctcacttttaatgaacaaatggcctttattaaaaactgagtgactctatatagctgatcagttttttcacctggaagcatttgtttctactttgatatgactgtttttcggacagtttatttgttgagagngtgaccaaaagttacatgtttgcacctttctaggtgaaaat

SEQ ID NO: 748 - DNA, 337 bp, Homo sapiens
  misc_feature 34, 63, 224, 302: n = A,T,C or G
ggcggagagaggcgagcaccgggaaggggagcgnggggccgctggaatgggtgaatttaaggnccatcgagtacgtttctttaattatgttccatcaggaatccgctgtgtggcttacaataaccagtcaaacagattggctgtttcacgaacagatggcactgtggaaatttataacttgtcagcaaactactttcaggagaaatttttcccaggtcatgagnctcgggctacagaagctttgtgctgggcagaaggacagcgactctttagtgctgggctcaatggcgagattatggagnatgatttacaggcgttaaacatcaagtatgctatg

SEQ ID NO: 749 - DNA, 261 bp, Homo sapiens
  misc_feature 112, 151, 163, 226, 253: n = A,T,C or G
ccgggaggctctgattatttacccaccacaggtaggttgtgttctgaatctcaggttcacaggttaaggctacagcatcctcatcctccacggggttggagttgttgctggngatgaagggtttgggtggctctgcatagactgtgatcgncgtgactgtggncctattgaggccagtgtctgagttatgggcttggcacgtataggatccactattattcacagngatgttggggataaagagctcttgggnggattgct

SEQ ID NO: 750 - DNA, 150 bp, Homo sapiens
  misc_feature 9, 56, 57, 146, 148, 149: n = A,T,C or G
aacgctgangacatgacatccaaagattactactttgactcctacgcacactttgnnatccacgaggagatgctgaaggacgaggtgcgcaccctcacttaccgcaactccatgtttcataaccggcacctcttcaaggacaaggngnng

SEQ ID NO: 751 - DNA, 288 bp, Homo sapiens
  misc_feature 131, 276: n = A,T,C or G
aaaacttttgttaagaaaaactgccagtttgtgcttttgaaatgtctgttttgacatcatagtctagtaaaattttgacagtgcatatgtactgttactaaaagctttatatgaaattattaatgtgaagnttttcatttataattcaaggaaggatttcctgaaaacatttcaagggatttatgtctacatatttgtgtgtgtgtgtgtgtatatatatgtaatatgcatacacagatgcatatgtgtatatataatgaaatttatgttgctggnattttgcatttt

SEQ ID NO: 752 - DNA, 248 bp, Homo sapiens
  misc_feature 188: n = A,T,C or G
ctggcactgaggattatatccatataagaattcaacagagaaacggcaggaagacccttactactgtccaagggatcgctgatgattacgataaaaagaaactagtgaaggcgtttaagaaaaagtttgcctgcaatggtactgtaattgagcatccggaatatggagaagtaattcagctacagggngaccaacgcaagaacatatgccagttcctcgtagagattggactggctaaggacgatcag

SEQ ID NO: 753 - DNA, 346 bp, Homo sapiens
  misc_feature 137, 313: n = A,T,C or G
ctgctagaaaacagggaagatattagccaatatggaattgccaggttcttcactgaatattttaacagtgtatgccagggaacacacattctctttcgagaattcagcttcgtccaagccaccccccacaatagggnatcatttttacgggccttctggagatgcttccgaactgtgggcaaaaatggcgatttgctgaccatgaaagaatatcactgtttgctgcaattactgtgtcctgatttcccgctggagctcactcagaaagcagccaggattgtgctcatggacgatgccatggactgcttgatgnctttttcagatttcctctttgccttccagatcc

SEQ ID NO: 754 - DNA, 100 bp, Homo sapiens
  misc_feature 22, 71: n = A,T,C or G
gtgccacaggcagccctggganataggaagctgggagcaaggaaagggtcttagtcactgcctcccgaagntgcttgaaagcactcggagaattgtgcag

SEQ ID NO: 755 - DNA, 405 bp, Homo sapiens
  misc_feature 214, 305, 366, 368, 378: n = A,T,C or G
tgtgggcccacttcccaaatctctggaggatctgcagcttactcataacaagatcacaaagctgggctcttttgaaggattggtaaacctgaccttcatccatctccagcacaatcggctgaaagaggatgctgtttcagctgcttttaaaggtcttaaatcactcgaataccttgacttgagcttcaatcagatagccagactgccttctggnctccctgtctctcttctaactctctacttagacaacaataagatcagcaacatccctgatgagtatttcaagcgttttaatgcattgcagnatctgcgtttatctcacaacgaactggctgatagtggaatacctggaaattctttcaatgngncatccctggntgagctggatctgtcctataacaagct

SEQ ID NO: 756 - DNA, 306 bp, Homo sapiens
  misc_feature 112, 157, 186, 271: n = A,T,C or G
ccttgggaaattacctggaaatgcgactgaaatcttccttcctgaggggtctgggctcttggaaatcaaaccctctcaggttgggtggctggacgattctcctcacacttanaatgggacaaggggaaccaggaggcccccaaggggatccctgggntccacacgaactcctcctaccctcattgngtgacagcagccatgcctcctcctggggatcaggatctattacctgtgcctggagaggaggggactcctcttctcacccgctggnctctggacacatactgtccaattcccctgtggcag

SEQ ID NO: 757 - DNA, 321 bp, Homo sapiens
  misc_feature 12, 46, 65, 79, 92, 127, 180, 186, 204, 208, 235, 275: n = A,T,C or G
ctggagggaggntccctgggaggtttttgtggattccttctgcagngactcccctggtttctggntctggggacccagngtccaggcgcagncttttagcacttctcagtgtagacgttgacagggntcttttcccgcttgaatcctgctgagtccccaaatctcttgacttgtcttggntacagncaccaccagagctgctcncagntttgacaaaagcagttgctgctgaagngatcgttttgaatcctatcatagcactggcaggtcccggnaaattcttacagtcagcaggcggacctcgtgtgagttgaatattcc

SEQ ID NO: 758 - DNA, 278 bp, Homo sapiens
  misc_feature 12, 54, 111, 149, 220, 226, 273: n = A,T,C or G
cgctcggcaagntctcccaggagaaagccatgttcagttcgagcgccaagatcntgaagcccaatggcgagaagccggacgagttcgagtccggcatctcccaggctcttntggagctggagatgaactcggacctcaaggctcagctnagggagctgaatattacggcagctaaggaaattgaagttggtggtggtcggaaagctatcataatctttgntcccgntcctcaaacctgcccgggcggccgcttcgagccctatagtgaggcgnattag

SEQ ID NO: 759 - DNA, 401 bp, Homo sapiens
  misc_feature 268, 301, 318, 321, 333, 367: n = A,T,C or G
gcaaactgcaaaccatggtgagaaattgacgacttcacactatggacagcttttcccaagatgtcaaaacaagactcctcatcatgataaggctcttacccccttttaatttgtccttgcttatgcctgcctctttcgcttggcaggatgatgctgtcattagtatttcacaagaagtagcttcagagggtaacttaacagagtatcagatctatcttgtcaatcccaacgttttacataaaataagagatcctttagtgcacccagngactgacattagcagcatctttaacacagccgngtgttcaaatgtacagnggnccttttcagagntggacttctagactcacctgttctcactccctgntttaattcaacccagccatgcaatgccaaataat

SEQ ID NO: 760 - DNA, 346 bp, Homo sapiens
  misc_feature 278, 335: n = A,T,C or G
ccgaggtttggatcatgggagaacagcagaaaggggttattgagggaacctacactgttctagctgcaccccatgcccttctcagaggaaagcctggcattgattagatactgggccagactaatactggcagcagagccagtgatagtaacctgcctaccagaggagccttccactgggttggcaattttgatctgggccccggacatctggcggatctcattaatgttggcgccttggcgcccgattatgcagccaattaagttatttggaatggngagttcatgggtggtttgagtagatgcatccaaacttgcccaatagcctttcacctntggagagacct

SEQ ID NO: 761 - DNA, 256 bp, Homo sapiens
  misc_feature 159, 185, 196: n = A,T,C or G
gagacagactgggtgatgacgctgaatctgcagaggtgctggtgaccaattcccctaaagcatctacttgtctcctcaaactgtgtaaagtgccctctgtctgccgctttcctttaattaatacttctgcttgcttggacatacagtgtcggagttggncctgaaaagtgtgataagacttaggnttttacacagnaagaaatgtaccagaactgctgctcagcttcctcacatacatttgataggcaaatctagc

SEQ ID NO: 762 - DNA, 321 bp, Homo sapiens
  misc_feature 12, 39, 162: n = A,T,C or G
tggactctggantgatgctggaagtagatacgaaaatgngaagaacaatggaacagcacactttctggagcatatggctttcaagggcaccaagaagagatcccagttagatctggaacttgagattgaaaatatgggtgctcatctcaatgcctatacctncagagagcagactgtatactatgccaaagcattctctaaagacttgccaagagctgtagaaattcttgctgatataatacaaaacagcacattgggagaagcagagattgaacgtgagcgtggagtaatccttagagagatgcaggaagttgaaaccaa

SEQ ID NO: 763 - DNA, 348 bp, Homo sapiens
  misc_feature 52, 66, 114, 127, 144, 152, 177, 200, 214, 261, 331: n = A,T,C or G
tgagaaaacataaagtaaccagcagatttcaatattaaaaagaagtggttcntcctaaaaaaggtnttagatcatagagttgggattagggtaggggatacctattaatctggnctggaaaaaaagngtgtggagaaggggagntgtattgntttctcacaagaggcaaacttcagncaaacaatgaagagatagtaggnagggagatgtgtgntagaccaaagactttctgattgctgataataacaaatttagcagctntctacaagtcaattaaaataccattctctgagacattttcagagaggagctaactaacacccacccaggnggaaaaatcattctaca

SEQ ID NO: 764 - DNA, 374 bp, Homo sapiens
  misc_feature 4, 59, 111, 129, 132, 198, 204, 242, 288, 327: n = A,T,C or G
agcnaagaaggaagctcctgcccctcctaaagctgaagccaaagcgaaggctttaaagnccaagaaggcagcgttgaaaggtgtccacagccacaaaaagaagaagatccncacgtcacccaccttccngcngccgaagacactgcgactccggagacagcccaaatatcctcggaagagcgctcccaggagaaacangcttgnccactatgctatcatcaagtttccgctgaccactgagnctgccatgaagaagatagaagacaacaacacacttgtgttcattgnggatgttaaagccaacaagcaccagattaaacaggctgngaagaagctgtatgacattgatgtggccaaggtcaacaccctgattc

SEQ ID NO: 765 - DNA, 288 bp, Homo sapiens
  misc_feature 181: n = A,T,C or G
aaatacaataattctgttattgataaaatttaaggcattttcattgccttttgcagatttactcataactacctaacaaggaaagaaggtataattatttcagattggattatttattctaaaattaaattcttcactaatttattctaagatgaatttaatagtccatcaggaaattggnttttataaagcttattttatgggcataaaatacaggaaaaggtaataataaatgccaaaccgtctctttactttatgaagccaaatatttcctcagacttggttttt

SEQ ID NO: 766 - DNA, 424 bp, Homo sapiens
  misc_feature 337: n = A,T,C or G
ttgtggttgtgcctgagggctctgcttccgacactcatgaacaggctatcttgcggttgcaagtcaccaatgttctgtctcagcctctgactcaggccactgttaaactagaacatgctaaatctgttgcttccagagccactgtcctccagaagacatccttcacccctgtaggggatgtttttgaactaaatttcatgaacgtcaaattttccagtggttattatgacttccttgtcgaagttgaaggtgacaaccggtatattgcaaataccgtagagctcagagtcaagatctccactgaagttggcatcacaaatgttgatctttccaccgnggataaggatcagagcattgcacccaaaactacccgggtgacatacgcagccaaagccaagggcacattcatcgcagacagccacca

SEQ ID NO: 767 - DNA, 302 bp, Homo sapiens
  misc_feature 203: n = A,T,C or G
ggctttctcaataagcctcagctttctaagatctaacaagatagccaccgagatccttatcgaaactcattttaggcaaatatgagttttattgtccgtttacttgtttcagagtttgtattgtgattatcaattaccacaccatctcccatgaagaaagggaacggtgaagtactaagcgctagaggaagcagccaagtcgnttagtggaagcatgattggtgcccagttagcctctgcaggatgtggaaacctccttccaggggaggttcagtgaattgtgtaggagaggttgtctgtgg

SEQ ID NO: 768 - DNA, 94 bp, Homo sapiens
  misc_feature 62, 63, 73, 86: n = A,T,C or G
ctgatctaaaagaagttactgaggaagatttgaataatcactttaagtctttgggaagcagnnatttgaaatnttgaggtgacagncttttaag

SEQ ID NO: 769 - DNA, 69 bp, Homo sapiens
  misc_feature 36, 40, 53: n = A,T,C or G
ctgcaagacgactccaacccaacaacaaccagatgngctncagcccagccggncttcagttccatattt

SEQ ID NO: 770 - DNA, 222 bp, Homo sapiens
ctgaacgcaaaccagccactttaattaagctaagcccttactagaccaatgggacttaaacccacaaacacttagttaacagctaagcaccctaatcaactggcttcaatctacttctcccgccgccgggaaaaaaggcgggagaagccccggcaggtttgaagctgcttcttcgaatttgcaattcaatatgaaaatcacctcggagctggtaaaaagagg

SEQ ID NO: 771 - DNA, 332 bp, Homo sapiens
  misc_feature 262: n = A,T,C or G
ctgctttccctcctatggctcccctggaacaggagggagagccaagggggcggcccagcctggacagcgcccgctcctgcctgggtgcacacacggcgggcctgagctccagcatctgagtttgggggtatgagaaacaggggagcagaaggagaagaaaactgcctgtgctgcaacacgtttcctcatttattttttctttctttttctttttttctttttttggagggagaggtccctgcaaggtcccttcccgggcagnggagggatggaaatgccgtcacagtagtagggactggagcgtctacaaggatggaggggagctactcagg

SEQ ID NO: 772 - DNA, 194 bp, Homo sapiens
aaaagaaagatcaattatatccatgcttaacaggatcagcaggagctttataaatgactttacagagactaataagggatttgatctttctttttttgttatcgaggcttttgaaatgtggaacttgtgtgttctgctttatatgttatattcaatatcttttcagatgcagtctatattttatgctgagtttt

SEQ ID NO: 773 - DNA, 272 bp, Homo sapiens
ccaattgatttgatggtaagggagggatcgttgacctcgtctgttatgtaaaggatgcgtagggatgggagggcgatgaggactaggatgatggcgggcaggatagttcagacggtttctatttcctgagcgtctgagatgttagtattagttagttttgttgtgagtgttaggaaaagggcatacaggactaggaagcagataaggaaaatgattatgagggcgtgatcatgaaaggtgataagctcttctatgataggggaagtagcgtc

SEQ ID NO: 774 - DNA, 314 bp, Homo sapiens
  misc_feature 18, 42, 45, 94, 95, 114, 117, 125, 143, 154, 198, 207, 222,245, 258, 287: n = A,T,C or G
gtgtcttgtacagttagntatattagcagccctctgagatgncgnatctatcggaaggatttcaaacaccaattgctttacctgaacaaatggnncttaccctttgaacagcanagngaccacgnagaaggaaggaaaagggnaaaatcgcttnagttaaactgaaattaaatgaacaataaggcaactatataagtnacttctagnagcattgcctgaganacaaattattgtttgataatttncattgtgaatagnaatccaatagatcatattgcttactttgntctttttatactatagaataatatttt

SEQ ID NO: 775 - DNA, 207 bp, Homo sapiens
cctgacagagctcagctcacactgggaagtgtggatgcagggtgcccttccctaccccagtgagaaggaagattccttacccatcttgcttcccccccagggaagatcatcatgcacgacccatttgccatgcggcccttttttggctacaacttcgggcactacctggaacactggctgagcatggaagggcgcaagggggcccag

SEQ ID NO: 776 - DNA, 196 bp, Homo sapiens
  misc_feature 37, 65, 100, 128, 139, 140: n = A,T,C or G
gtgaacggaggcactgtggccgagaagctggactggncccgcgagaggcttgagcagcaggtacntgtgaaccaagtgtttgggcaggatgagatgatcnacgtcatcggggtgaccaagggcaaagnctacaaagggnncaccagtcgttggcacaccaagaagctgccccgcaagacccaccgaggacctcggc

SEQ ID NO: 777 - DNA, 325 bp, Homo sapiens
  misc_feature 55, 218, 239: n = A,T,C or G
aaagttgaactaagattctatcttggacaaccagctatcaccaggctcggtaggnttgtcgcctctacctataaatcttcccactattttgctacatagacgggtgtgctcttttagctgttcttaggtagctcgtctggtttcgggggtcttagctttggctctccttgcaaagttatttctagttaattcattatgcagaaggtataggggttagnccttgctatattatgcttggntataatttttcatctttcccttgcggtactatatctattgcgccaggtttcaatttctatcgcctatactttatttgggtaaatgg

SEQ ID NO: 778 - DNA, 421 bp, Homo sapiens
  misc_feature 147, 191, 228, 231, 233, 280, 366, 384: n = A,T,C or G
ccaaaagaagtaagacagcttgctgaagatttcctgaaagactatattcatataaacattggtgcacttgaactgagtgcaaaccacaacattcttcagattgtggatgtgtgtcatgacgtagaaaaggatgaaaaacttattcgnctaatggaagagatcatgagtgagaaggagaataaaaccattgnttttgtggaaaccaaaagaagatgtgatgagcttacncananaaatgaggagagatgggtggcctgccatgggtatccatggtgacaanagtcaacaagagcgtgactgggttctaaatgaattcaaacatggaaaagctcctattctgattgctacagatgtggcctccagagngctagatgtggaagatgngaaatttgtcatcaattatgactaccctaactcctca

SEQ ID NO: 779 - DNA, 330 bp, Homo sapiens
ctgaactttccgcttacgctgcccagagctgccaggtgtagactgagaattcgagttttgtttcttccttggggttgtatctgcagccttttctccctgggactccctgtctgctgccaatggagttgaagaactggaatgatgacacagctcctcttctcttattttctttgctggcctctccggtgtctgggagcgggaggaggcttgggctagagaagggtgatgaactggggccatttctcttccagagctgtgagatgcctcgagtggagctgtaggaactggtaatggcattgcggctggagctagggatgccacttgcgtaag

SEQ ID NO: 780 - DNA, 279 bp, Homo sapiens
gagaggtagagtttttttcgtgatagtggttcactggataagtggcgttggcttgccatgattgtgaggggtaggagtcaggtagttagtattaggaggggggttgttagggggtcggaggaaaaggttggggaacagctaaataggttgttgttgatttggttaaaaaatagtagagggatgatgctaataattaggctgtgggtggttgtgttgattcaaattatgtgttttttggaaagtcatgtcagtggtagtaatataattgttgggacgatt

SEQ ID NO: 781 - DNA, 323 bp, Homo sapiens
ttgatcttctgcaggaaggtgcagcttttccatatcagctcaaccacgccgccagtccattcttaaggaactgccgactaggactgatgatgcattttagctttgagcttttgggggttattctaccaacaaacagtccattggaaagaaaacagtccctggaattaacagattagaatgttcacactggttaatctttttttaacaatgagcatgaaggtagcagaagctggtgtgtttccagatggttcttctaaccaaactaatttttcactgttgacaagcgaggcaagggttgcactggaccaaaggctgaggcttgg

SEQ ID NO: 782 - DNA, 264 bp, Homo sapiens
  misc_feature 47, 69, 195, 262: n = A,T,C or G
ttctagctttgccctcactccccggaaaaactgacactgacacaggngctctttccttgcccctttagntggtacctcagtggggaggcttccttaccaagaatgagttcctgaaacccagggccagagacaaggacaacttaggggaagacggggttttcggtggagccaggggcaaatcttaatgggaccagngggggataccccagagcccatggcctgactgcacagcctgcctggaggatgggtgcgcagttctgcnct

SEQ ID NO: 783 - DNA, 159 bp, Homo sapiens
ctgtgtgaaggcgacagtggtgcaggtcttcctgtggactagacgtcccagtcttgcctttcccttgataatgcagtaagggacccccattttacgacacagggcaggcaagaagacaaccagctcgatgggatccacgtcgtgtgcaatcaccaccag

SEQ ID NO: 784 - DNA, 128 bp, Homo sapiens
ctcggccctcttacaccattttgtttgattgtctagtccctgtttctttttctttctaatccttattcatttaagcaaaaccatacattatcttttccagtcctttcttgtattcttactgttttttt

SEQ ID NO: 785 - DNA, 346 bp, Homo sapiens
  misc_feature 142, 323, 325, 330: n = A,T,C or G
ctgggctgatgctggaactcgtagaagtacacaggggcccgggaacactgaaaatgtgctacttggagtgcagggatcacaaacatggagtccgccatcatctcctggaactgcgcttggagggtctggggatccccattgnccccaatgtactcctccctcagcaggtcaccaaatgtaggaggcaacatcagcagcgttaacattttctgcagagcagcctgggaggcctctctgtccatttccttctgggtatcatagatcctcatgaccttggggatgagccagccgaattcattgttgttgacaccaacaatgctagngnacagnctgaaagtcggcagag

SEQ ID NO: 786 - DNA, 118 bp, Homo sapiens
ctgcactgatctgtggggagagttttacagacttttcattccagcctcctccattgacagtgaggtcttcattcaatcctgaagaaacctgaagtgtagaatctccttttccagattt

SEQ ID NO: 787 - DNA, 257 bp, Homo sapiens
cactcattcatcgacctccccaccccatccaacatctccgcatgatgaaacttcggctcactccttggcgcctgcctgatcctccaaatcaccacaggactattcctagccatgcactactcaccagacgcctcaaccgccttttcatcaatcgcccacatcactcgagacgtaaattatggctgaatcatccgctaccttcacgccaatggcgcctcaatattctttatctgcctcttcctacacatcgggcgagg

SEQ ID NO: 788 - DNA, 155 bp, Homo sapiens
  misc_feature 15, 22, 34, 38, 45, 69, 73, 127: n = A,T,C or G
cgcaagagcctatgnatgtggnatccagaactcngtgngcgcaanccgcagagacccagtcaccctggntgtnctctatgggccggacacccccatcatttcccccccagactcgtcttacctttcnggagcgaacctcaacctctcctgccact

SEQ ID NO: 789 - DNA, 382 bp, Homo sapiens
  misc_feature 203, 225: n = A,T,C or G
cctaagtaaatgaagagctgtaccatattcatgtattggaagacaacattgtaaagatgacatggtttaccagattaatctataaattcaatacaaatccaatcaaaatttcaatgctcttgggtttgtttgatttataaattgttggtctaattctagaagtaatatggaggaacagttggctaagaatagccaagacactncaaggaagaacaattttgtggngatactggagacagaggtgaaattggttacaattatgacaaaatgtggaggcatcttggtttttatcagaccttttcctaaagttgcaataatcaggactgtactgtactgctacaagattagacaaattgatgtcagtcagaatagaaatcatcaa

SEQ ID NO: 790 - DNA, 273 bp, Homo sapiens
  misc_feature 61, 96, 108, 129, 130, 184, 216: n = A,T,C or G
ggatccgctacacagtttctgccagtccctgagttgatgccttttcggctaactcgccagnttatcaatctgatgttaccaatgaaagaaacggtncttatgtacagnatcatggtacacgcactccgnnccttccgctcagaccctggcctgctcaccaacaccatggatgtgtttgtcaagnagccctcctttgattggaaaaattttgaacanaaaatgctgaaaaaaggagggtcatggattcaagaaataaatgttgctgaaaaaaat

SEQ ID NO: 791 - DNA, 344 bp, Homo sapiens
  misc_feature 100: n = A,T,C or G
aaagaatcagcaaaatttcaaataaaaaattatgaaaatattatcctcattagttcatttagtcccatgaaattaattattttctctgcttgatcttggnggacagtttcatgaagctgtcagttagttcattaaagttttggaaattctcagacagtgcagtggtatcagaaacttgtattcaagagtacaggtcagagccttcttttcttttctttttgagatggagtcttgctctgttgccagactggagtgcagtggtgcgatctgggctcactgcaatctccacctcccgggttcaagcgattctcctgcctcagcctcccgagtaactgggactacag

SEQ ID NO: 792 - DNA, 227 bp, Homo sapiens
  misc_feature 97, 215: n = A,T,C or G
gacaaacctgaaattgaagatgttggttctgatgaggaagaagaaaagaaggatggtgacaagaagaagaagaagattaaggaaaagtacatcgatnaagaagagctcaacaaaacaaagcccatctggaccagaaatcccgacgatattactaatgaggagtacggagaattctataagagcttgaccaatgactgggaagatcacttggcagngaagcatttttc

SEQ ID NO: 793 - DNA, 328 bp, Homo sapiens
aaacaagtcatttttcttgatcgttgtggaaggtttggagccttagaggtatgtcagaaaaaatatgttggtattctcccttgggtagggggaaatgacctttttacaagagagtgaaatttaggtcagggaaaagaccaagggccagcattgctacttttgtgtgtgtgtgtgggttttgttttgtttttttggttggccggttgttttcgttgttgttaacaaaggaatgagaatatgtaatacttaaataaacatgaccacgaagaatgctgttctgatttactagagaatgttcccaatttgaatttagggtgattttacctgc

SEQ ID NO: 794 - DNA, 290 bp, Homo sapiens
ccagcgagcacatgaagcggttcttcatgaactttgtggttgggcaggatccgggctcagacgccgccttccacttcaatccgcggtttgacggctgggacaaggtggtcttcaacacgttgcagggcgggaagtggggcagcgaggagaggaagaggagcatgcccttcaaaaagggtgccgcctttgagctggtcttcatagtcctggctgagcactacaaggtggtggtaaatggaaatcccttctatgagtacgggcaccggcttcccctacagatggtcacccac

SEQ ID NO: 795 - DNA, 343 bp, Homo sapiens
aaaatcaaagaaatccttgttttgaaaattggatcttaatctcaaaattgtagaacttggctgagaccattgctttcattttgaaaatgaacttcaactccagaaagaccagtgtgtgctctgccaaataaatttctgagtcacagtctcactaggaatgtgcaaatcaaagcatatgttggtgtaaattcttttgaagtccttgccaagataatcaatggcatttacatttgcttttttctttaataaaaattccaccattttcacttttcttcgactcacagcaagtaacagtggctgatattcattcttgctgcattcttcaatatttgtaccatgtgaa

SEQ ID NO: 796 - DNA, 354 bp, Homo sapiens
tggcgggccgctgaataagcttccaaaatgatgcccacaccagttattctattgaaagaggggactgatagctcccaaggcatcccccagcttgtgagtaacatcagtgcctgccaggtgattgctgaggctgtaagaactaccctgggtccccgtggcatggacaagcttattgtagatggcagaggcaaagcaacaatttctaatgatggggccacaattctgaaacttcttgatgttgtccatcctgcagcaaagactttggtagacattgccaaatcccaagatgctgaggtgggtgatggcaccacctcagtgaccttgctggctgcagagtttctgaagcagacctgc

SEQ ID NO: 797 - DNA, 309 bp, Homo sapiens
ctgtgccgtctgcctgagcccatggatgctttctcaatcctaggctggttactgtgtaagcgttttggagtacggggccttgagcgggtgggagctgtgtgttgaagtacagagggaggttggggtgggtcagagccgagttaagagattttctttgttgctggaccccttcttgaaggtagacgtcccccacccggagagacgtcgcgctgtggcctgaagtggcgcaagcttgctttgtaaatatctgtggtcccgatgtagtgcccagaacgtttgtgcgaggcagctctgcgcccgggttccagc

SEQ ID NO: 798 - DNA, 315 bp, Homo sapiens
ccaccagcattgacgttcttgccatccagaagagctgacagtgtcagtttaatacctggctttagagtctgagtgtatcctaaacctatcaggctggagttgttcactttagccgagaagcaggcgtcagggtcaatctgatacttggctgctattccgaagcgcgtgttactgtttcctgctgtccaggcaagattgacagcggtctccaacttcttgttcactttctggtaaatggagccgccaaactctgtcccgtcattcacattagtgtgaagctggaattcatcagtcttgtagccaactgcaaagttg

SEQ ID NO: 799 - DNA, 157 bp, Homo sapiens
ctgtgatttcctccatagttggcttctgggtcaggccataggcaatattttcttgaagacttcttccaaatacctgtggctcttgtcccactgcagccacctgcctgtgcaggtagcggtgctcatattggggaaggggcttcccatccaacagcag

SEQ ID NO: 800 - DNA, 357 bp, Homo sapiens
aaactcagtgaacccaaacctatttttttcaatctgaatattgctgcagcaaaaccaactccaccaaaaagccgggtaacattaacaaaagaattccctgtatcatctggatctcaacatcggaaaaaagaagcggatagtgtttatggagaatgggttcctgtcgagaaaaatggtgaagaaaacaaagatgatgataatgttttcagcagcaatttgccctcagagcctgtggacatctctacagcaatgagtgaacgggcacttgctcagaaaagactcagtgagaatgcatttgatcttgaagccatgagcatgttaaatagagctcaggaaaggattgatgcctgggctcag

SEQ ID NO: 801 - DNA, 359 bp, Homo sapiens
cctagggggcatatcaagggtttaatagactgggggaatgggcaacagaactggctaccttagaggctctggaatgccccccacccatccacccaccaatggaaggaaagtcaggcatcgcctaaaaggagtggtccctatctagccccaagtctggagcagaaagggcaggtccattctggcccaagtgacattgttagatcctgtcccctcccccaatcactgctgcttgccagggtgcctcttcacagttcccatgtggcagcagtagtggcagaggcagaagtggacttattgtagattgcagtacagatacatggacacaatcatggcagccagctcgaggcccccaattccag

SEQ ID NO: 802 - DNA, 207 bp, Homo sapiens
ccaggctcgggcaccacctcaatcacatccatgatcaagatccgccctcggcacgtgacctcctccccctgcatgaggcaggtcccggcggccacgtagcctttgaggcccgacacggtctcctcactgcgcagagacactgtcttcatgcaggtcacatgctcccactcctgcagctcgatcctggcattgggaatagcctcccag

SEQ ID NO: 803 - DNA, 311 bp, Homo sapiens
  misc_feature 88, 94, 188, 219, 274: n = A,T,C or G
cctatttcactgctgtgtagcctcagtgcctaacatgggtgccaaataaatattcgtagaattacactgaattgtaaaaaccattcgnttttgnttacaattgccaaaaatctcaaaaggccctgtatttatgtaattctttgaaattattattttattttgatttctcagttattgactggctgggngtgacttagtacataagtactcaatattatnaaaacctcaaataattgacttgattttacacaacatccttcccttttctacaagntaatttttttacaaatcatttgggttatctcctaaat

SEQ ID NO: 804 - DNA, 202 bp, Homo sapiens
ctgttcggatttaacttcatcttctggcttgccgggattgctgtccttgccattggactatggctccgattcgactctcagaccaagagcatcttcgagcaagaaactaataataataattccagcttctacacaggagtctatattctgatcggagccggcgccctcatgatgctggtgggcttcctgggctgctgcgggg

SEQ ID NO: 805 - DNA, 238 bp, Homo sapiens
ccaaccagtctggctggagtgatgcattcctggcccagcacacgatgcttaccctggatcccaacgtcaccggtgtcttcctgggaccctacccctttggcatcgatcctatttggagcctggctgccaaccacttgagcttcctcaactccttcaagatgaagatgtccgtcatcctgggcgtcgtgcacatggcctttggggtggtcctcggagtcttcaaccacgtgcactttgg

SEQ ID NO: 806 - DNA, 325 bp, Homo sapiens
  misc_feature 129, 141, 291: n = A,T,C or G
cctgaggtctgcggaaggtgggaggaggcagacgccctgcgtggcccatggtcggggcgtccacgccgaggccggcaacaaacgacagtatctcggattccttttttttttaattttttatactttggngtttcacttcgngctctgaatactgaataaccatgaatgactgaatagtttagtccagatttttacagaggatacatctatttttatcattatttggggtttgaaaaatttttttttacaccttctaatttctttatttctcaaagcagataattcttctgngtgaaaatgttttctttttttaatttaaggttta

SEQ ID NO: 807 - DNA, 289 bp, Homo sapiens
cctaaagggaactgtcttctgtcgagaagtaaaggaaacttcatgaaggatgtagaagcttagctgcctcagagaagagagaacctgaagatctgaggcaagctggacaggagaggtagatatttgttgatggaagaattcaagtttataatcaattcccacttagcacctactgtgtgctaggaacttgaatgtgtatgtttgacaagtcctgcttggcctgatgggtgggagaaggaacctgagcctggctgagatggctaggcggagggctttgaagtccaagcag

SEQ ID NO: 808 - DNA, 376 bp, Homo sapiens
aaacttaattaaagagcttgacaagctctgcatattcatgtgtcataagcagtatgtgacaaaaaaaactgtgcagtatgtaccccctcacgaaatttagtttggcagggaaaacaagatgcacatgttattataaattagaaaatggaagagaagtagaaataaatccatgagtattatatataagtaacagaacaaaaacaacaggataatgtatcccccccaaaggcccagtagagaccatcaaagctcattctgggggtagtcaaggagggagtggagggagaaaaagaacgcagaccttcaaccactaatgaaagaactgaaacatctgtatgtagaaaaaaggtaaaatcaactcactatcatcttcagc

SEQ ID NO: 809 - DNA, 243 bp, Homo sapiens
  misc_feature 19, 162, 174, 175, 182, 193, 198: n = A,T,C or G
ccatctcattttcaaagtncagagctacataacacagtttctccttgatgtcccggacaatctcacgctcagcagtagtaacgaaggaatagccacgctcagtcaggatcttcatgaggtagtcagtgagatctcggccagccagatccagacgcatgatgncatggggcaagnnatagccntcatagatggngacantgtgggtgacaccatctccagagtccagcacgatgccagttgtgc

SEQ ID NO: 810 - DNA, 274 bp, Homo sapiens
aaaaaacacgtttgttattaccaaaaagagacgtctttaggtaaaaataataaaaaccccatgctgcattgataatgcagatagttctatttatctggtcaacgggcaaaaagcaagcactttaggtcttcagctccaatcttttgttcatttcttattgctggaatttcatatttcttcttgttggatgactaaaccggatgatggtagagatggtaagccggcatttactcagccccgccctgctcagcctcgggagcggacgaattctcag

SEQ ID NO: 811 - DNA, 205 bp, Homo sapiens
ctggtggagatcatcaaggtgctgggaacaccaacccgggaacaaatccgagagatgaaccccaactacacggagttcaagttccctcagattaaagctcacccctggacaaaggtgttcaaatctcgaacgccgccagaggccatcgcgctctgctctagcctgctggagtacaccccatcctcaaggctctccccactagagg

SEQ ID NO: 812 - DNA, 199 bp, Homo sapiens
aaatattgctgctgctttgtagatgatgagaagaaatgttaaagtgctttctaaaaggaaattttttcacctttggaggagaatatattagagttgtgggtaatttttcacagccacctatgtacatactaattacccattggatacttatatctaaaagtctcatgctgaagtatagtttttgggaaagaatgatttt

SEQ ID NO: 813 - DNA, 334 bp, Homo sapiens
  misc_feature 40: n = A,T,C or G
cctcaccgccgatgcaaggatagtcatcaacagggcccgngtggagtgccagagccaccggctgactgtggaggacccggtcactgtggagtacatcacccgctacatcgccagtctgaagcagcgttatacgcagagcaatgggcgcaggccgtttggcatctctgccctcatcgtgggtttcgactttgatggcactcctaggctctatcagactgacccctcgggcacataccatgcctggaaggccaatgccataggccggggtgccaagtcagtgcgtgagttcctggagaagaactatactgacgaagccattgctctgcgacctgcc

SEQ ID NO: 814 - DNA, 358 bp, Homo sapiens
ctgaagcttggaacttctggacaagaaaaggcctggtttctggtggcctctatgaatcccatgtagggtgcagaccgtactccatccctccctgtgagcaccacgtcaacggctcccggcccccatgcacgggggagggagatacccccaagtgtagcaagatctgtgagcctggctacagcccgacctacaaacaggacaagcactacggatacaattcctacagcgtctccaatagcgagaaggacatcatggccgagatctacaaaaacggccccgtggagggagctttctctgtgtattcggacttcctgctctacaagtcaggagtgtaccaacacgtcaccggagagatgat

SEQ ID NO: 815 - DNA, 203 bp, Homo sapiens
ctggaagccggactcagccagggtgcgctactaccagagcctgcaggctcatctcaaggtggacgtgtacagacgctcccacaagcctctgcccaaggggaccatgatggagacgctgtcccggtacaagttctacctggccttcgagaactccttgcaccccgactacatcaccgagaagctgtggaggaacgccctggagg

SEQ ID NO: 816 - DNA, 92 bp, Homo sapiens
cggccgcagaagcgagatgacgaagggaacgtcatcgtttggaaagcgtcgcaataagacgcacacgttgtgccgccgctgtggctctaagg

SEQ ID NO: 817 - DNA, 367 bp, Homo sapiens
ttggaggactatttgaattttgcaaactatctcttgtgggtttttacaccactaatacttttaatacttccttactttactatctttcttctctaccttactattattttcttacacatttataagagaaagaatgtattgaaagaagcctactctcataatttatgggatggtgcaaggaaaacagtggcaactctgtgggatggacatgcagccgtttggcatggttatgaagttcatggaatggaaaaaataccagaagatggaccagcacttataattttttatcatggagctattcctatagatttttactatttcatggctaaaatatttatacacaaaggcagaacttgccgagtagtag

SEQ ID NO: 818 - DNA, 381 bp, Homo sapiens
aaataaaagtattacgtaactttgaaatttgtataaaattaaaagatagtaaaaacaactattctaacagaattcaaaacctgttatgcttcagtggagagattattcaagataagtccgtgggaaattgggagtacatttctactggcaaagttagtgataactatgcacttctgacaaaatgtgaaatggggggtatgggcgtgtcatatcatcatggtgcagatacgtggatgtgtgcttccaaacaatggcaacctaactgactgctggaaccatacaaaatacctgaaactactcagaaagaaggtgaaaattgcatgcaaaaattatttgaaaaatattgagctaacacaacatgaatttggaattataagtgag

SEQ ID NO: 819 - DNA, 109 bp, Homo sapiens
ccatggccgcttccagaccatggaggagaagaaagcattcatgggaccactgaagaaagaccgaattgcaaaggaagaaggagcttaatgccaggaacagattttgcag

SEQ ID NO: 820 - DNA, 309 bp, Homo sapiens
  misc_feature 110, 134, 164, 185, 235, 291, 304: n = A,T,C or G
ctggaaaaacctttcagcgaaccatttcagctcaggacacgttagcgtatgccacagctttgttgaatgaaaaagagcaatcaggaagcagtaatgggtcggagagtagncctgccaatgagaacggagacagncatctacagcagggttcagaatctcccatnatgattggtgagttgagaagngaccttgatgatgttgatccctagaggaacatgcccagcctgagaggagncaagacacaatactggatgctcagcaccttctttggaatcagaatctcgaaccctntggaagagcctgnagatt

SEQ ID NO: 821 - DNA, 236 bp, Homo sapiens
catccgcttcctgaatgctgagaatgcacagaaattcaaaacaaagtttgaagaatgcaggaaagagatcgaagagagagaaaagaaagcaggatcaggcaaaaatgatcatgccgaaaaagtggcggaaaagctagaagctctctcggtgaaggaggagaccaaggaggatgctgaggagaagcaataaatcgtcttattttattttcttttcctctctttcctttccttttttt

SEQ ID NO: 822 - DNA, 388 bp, Homo sapiens
  misc_feature 117, 360: n = A,T,C or G
gcgaggcaagatggagttagtgcaggtcctgaaacgcgggctgcagcagatcaccggccacggcggtctccgaggctatctacgggtttttttcaggacaaatgatgcgaaggttgntacattagtgggggaagacaaatatggaaacaaatactatgaagacaacaagcaattttttggccgtcaccgatgggttgtatatactactgaaatgaatggcaaaaacacattctgggatgtggatggaagcatggtgcctcctgaatggcatcgttggcttcacagtatgactgatgatcctccaacaacaaaaccacttactgctcgtaaattcatttggacgaaccataaattcaacgngactggcaccccagaacaatatgtacct

SEQ ID NO: 823 - DNA, 353 bp, Homo sapiens
  misc_feature 177, 297: n = A,T,C or G
aaaagtttggatctttttctcagcaggtatcagttgtaaataatgaattaggggccaaaatgcaaaacgaaaaatgaagcagctacatgtagttagtaatttctagtttgaactgtaattgaatattgtggcttcatatgtattattttatattgtacttttttcattattgatggnttggactttaataagagaaattccatagtttttaatatcccagaagtgagacaatttgaacagtgtattctagaaaacaatacactaactgaacagaagtgaatgcttatatatattatnatagccttaaacctttttcctctaatgccttaactgtcaaataattataacctttt

SEQ ID NO: 824 - DNA, 264 bp, Homo sapiens
  misc_feature 186, 223, 226, 249: n = A,T,C or G
ctgggtgcaggcgggctgagtccgaaaagagagtcagcaaagggagatggggtggggccgttttataggattagggaaggtaatggaaaattacagtcaaagggggtttgttctctggtgggcaggtgtggatctcacaaagtacactctcaagggtggggagaattacaaaggaccttcttaagngtgggggagattacaaagtacatttatcagttagggnggngcaggaacaaatcacaatgttgnaatgtcatcagttaa

SEQ ID NO: 825 - DNA, 361 bp, Homo sapiens
  misc_feature 210: n = A,T,C or G
aaaatccagtttgttgttaacaaaacctactgctgggtggttttgaatatattacttttaggcatgatctccccaatgtgtttttactccttttccggcttctaggacagaggtatgtagtcaaagaatcctatggtggatctgaattgggtttcagctactgtacctggtccttgtgaattaaaaaaataaagtcacaaaaaccatatnacaaaacaaattaaaataaatagacaaaatgaagctgtctccagaccttctgcattgacacacaggtttgaagtcaaccaaagcactcatgctaatctggatgggaacactagggagacagaaaccccagtatgaaaccatgtacttgagc

SEQ ID NO: 826 - DNA, 195 bp, Homo sapiens
  misc_feature 10, 26, 32, 44, 162, 179: n = A,T,C or G
ccccagaagngacgcagccctctatnggcccnaatcttcttcantcgctccaggtcttcacggagcttgttgtccagaccattggctaggacctggctgtattttccatcctttacatccttctgtctgttcaagaaccagtctgggatcttgtactggcgnggattctgcataatggngatcacacgttccacc

SEQ ID NO: 827 - DNA, 227 bp, Homo sapiens
caacggctcttcacagaccacctccttttctaaggaaaatggctggtatgacgtgatgagtgatacatattttgattcaggttttgtctctaaagtagcacttcttaccacagagatcaaggacttgggtaatattatgcttttttccttcaatggattaattttcttaatataaaaacagatgaataccaggctaagcactagaaagagtagtaaagcagcaacaa

SEQ ID NO: 828 - DNA, 242 bp, Homo sapiens
  misc_feature 65, 214, 222: n = A,T,C or G
atgtccggggagtcagccaggagcttggggaagggaagcgcgcccccggggccggtcccggaggntcgatccgcatctacagcatgaggttctgcccgtttgctgagaggacgcgtctagtcctgaaggccaagggaatcaggcatgaagtcatcaatatcaacctgaaaaataagcctgagtggttctttaagaaaaatccctttggtctggngccagttntggaaaacagtcagggtcag

SEQ ID NO: 829 - DNA, 374 bp, Homo sapiens
  misc_feature 339: n = A,T,C or G
gaggtcctgaaaaggaatacacttccatatcatgccatctcttacactggcattccttgcctatgcatgtgcatggcttgccctggtttagcttggaaactgattgaaagtcagagagatcactggctttgagacttgcttgggggacttgggtagcgtcagaggagtcttccttcttactctctgatgggagccttggaacagaagttctcaaaggctcaacgactgcccctgcgtgattagcatcgagagaagtagagctttctcctgcactgaactctttaggggatgaaattcccagcccactgctgccatcaggtgagtcagtctggcttttgngcttgagttgactgctggaagaagacgctattgta

SEQ ID NO: 830 - DNA, 325 bp, Homo sapiens
  misc_feature 239, 313: n = A,T,C or G
gttcaaagcagaaaatcctgagcctctagtgtttggtgtgaagtacaatgcaagttcttttgccaagttcacgcttattgtgacagatgtgaatgaagcacctcaattctcccaacacgtattccaagcgaaagtcagtgaggatgtagctataggcactaaagtgggcaatgtgactgccaaggatccagaaggtctggacataagttattcactgaggggagacacaagaggttggnttaaaattgaccacgtgactggtgagatctttagtgtggctccattggacagagaagccggaagtccatatcgngtacaagtggtg

SEQ ID NO: 831 - DNA, 85 bp, Homo sapiens
tggtaccgggccccccccctgagcgatggagcgtgggtagggagggtccacagtgtccactcgccgtgtgcgaaggttgactcgg

SEQ ID NO: 832 - DNA, 202 bp, Homo sapiens
aggcggagaggatcatgtccgggaactgcggggtagtagcgatctgggttacccagccgttgtggcccttgagggtgccacgaagggtcatctgctcagtcatggcggcggcgagagcgtgtgtcgctgcagcgacgaggatggcactggatggcttagagaaactagcaccacaacctctcctgccgtcgacgcggccgcg

SEQ ID NO: 833 - DNA, 503 bp, Homo sapiens
  misc_feature 434, 477, 495: n = A,T,C or G
ccggctggtcctgcatcgccatctgctggccgcgcggcacggccggttcctggagccagcaggagtcggaggctgcagggcttgaaggcctcttcaccgtgccctccagggagcctagctgccgaagtattcctgctggaacttctggaagtcttcctcggtgaacacggtgccctcagccttcttcttcttggtcttggccacaggccggtcacaggccttgcggccccggttctggcgcaaaatctgctggctcacagactcagccacggtgcttctcgtcctggtcagaaacttcaggtttactctgaggtggtctcgacactctcgcttccggtactcgtccagtgccgacttgggcacctttcccttggccgagttccgcagtttctgggcctgaattgccttcgtcttccggggccgtttcaccggancccctctcggcttggcctgacctggagggtcccggggggcctnggacgccgccagcagctncaggcccc

SEQ ID NO: 834 - DNA, 208 bp, Homo sapiens
atccagagacaatctgccggttgtcagaggagaaggccacactcagcacatccttggtatggcccacaaatcgcctcgtggtggtgcccgttgtgagatcccagaggcgcagggttccatcccaggagcctgagagggcaaactggccatctgaggagataaccacatcactaacaaagtgggagtgaccccgcagagcacgctgtgg

SEQ ID NO: 835 - DNA, 210 bp, Homo sapiens
  misc_feature 88: n = A,T,C or G
tgatgtgggcgattgatgaaaaggcggttgaggcgtctggtgagtagtgcatggctaggaatagtcctgtggtgatttggaggatcangcaggcgccaaggagtgagccgaagtttcatcatgcggagatgttggatggggtggggaggtcgatgaatgagtggttaattaattttattagggggttaattttgcggtcgacgcggccgc

SEQ ID NO: 836 - DNA, 426 bp, Homo sapiens
cggccgccacgctggttttgcatcttcaggagacgctcgtagccctcgcgcttctcctcggccaattcgcggaagaagtggctcacgccttccagagccacatcatcgcggtcgaaatagaagcccagagagaggtaggtgtaggaggcctgcaggtacaaattgaccaggctgttgacggctgcctccacgtcggtggaataattctgacgaatctgggagctcatggttggttggcaagaaggagctaaccacaaaaacggtgctggcaggtcccagaagcaggagatggccgagaagatggtcccggaggttgcaagcggagaggaaatcggagggcggtcggaggctggaagagagtccccggatctgttccgtccaaacactgttgaagcaagagacagacccgcggtcgacgcggccgcg

SEQ ID NO: 837 - DNA, 134 bp, Homo sapiens
ccagggccgtgggccgaccccggcggggccgatccgagggcctcactaaaccatccaatcggtagtagcgacgggcggtgtgtacaaagggcagggacttaatcaacgcaagcttatgacccgcacttactggg

SEQ ID NO: 838 - DNA, 538 bp, Homo sapiens
  misc_feature 480: n = A,T,C or G
ggcgtcctggtgcttaccacctggaaactggtgaggtggtgggagaactcctggtggaccctagtggaagccttccagtaatttcttgaagctgagcgctcaggtgagtagggcgacatctggtggccggttgttgaaggtcattgcagagaggaaggaagccgaggaggggagcctgcagtgagggcgtcctggggttctccggttctcaccacccttgggccacgccgtctagtccacacctgaggagttggtcaggtagaaggggcggatgaccgtgcggaagccgttgaagtgccctgccgggcaggggaaggaggaggtgctcttcgagctgttggtgtccagggcactgggaatcgcagccttccagccctcgaaatcggtgacgtctgccacgaagagcccttcgcagagcatcagggctttgttttcgtaggcaatggtgcgatctgagccgccagacttggtgaggcccangacagggagctcgtccgaggagcaggagaagccgtagttccagcagctctggatggtg

SEQ ID NO: 839 - DNA, 351 bp, Homo sapiens
aaggcggcaacggtggtgaaagatatagcaggcctggtctttgtacagcggatgctcgtgaagagggggcgagcggtagaaccttgggtccttgtagccgcggtcccagggcggaaagatcggccgcgccagccagggcacgaagtgcatcttccccgcaaaggtgatgggctccagtccagggatctcgtaccccctatccaggggaggaggctccgacttccgcgtggagcgcacgccccactcatacgccccgcgtctcggggccccgaagcccccaaggccgagctgcccggagccagctagcgcccgccttgcgggcccggacgccaatgccataccgatctgata

SEQ ID NO: 840 - DNA, 574 bp, Homo sapiens
tggcctgcaaggccgcggacagggcgagcaccgagtcgtacattttgcagctcatcatccccgtgctctgcgtgacgcagtccatccacagccccttgtacatggcctgggccgtgatgatgttgtcacccgcataggagctcatctgccactgcgggatggcggtgcaggccaccagacccacccagcccagcagggccatggagaagcccagcaactgcaggcccgaattggccatttccgccctcagaaaacactgggggcgccgggcgggagaccctacagtaaaacaaacgacacttggggggcagccccacaaaagaaaacttgaggtggagttttccggtcacccaaagagacaaaaagggtttgggccaggtgaatgcaaatcttgtcaccaaactacacacaaatcgacccctccagtgaagcgatggcctcgcggcacagggagtaggatacgccgggagggtggttccagacaaaattggtggtccccgaaggccaggcggttccctccggcgctctcggcgaccctaggcaaacaaaaggtggaggggccgtctgggcgcgt

SEQ ID NO: 841 - DNA, 195 bp, Homo sapiens
gacccaggggcacaggctcccagatgatagcccctctctgaatgagcacccaggcaacacagtccggggctgtgtgtagcaaacctgtcagcagctgcctcctgggacaaccacccccttacatgctatctatctaccagacaaatgaaagctcttcttaccccatctcccaggcaccccccagcaagggctctg

SEQ ID NO: 842 - DNA, 207 bp, Homo sapiens
  misc_feature 85, 87, 89, 101, 127, 138, 139, 147, 149, 150, 191: n = A,T,C or G
cggccgccctttttttttttttttcgttgaaaaccaataatttatcaaaacgctgcgtgtgtatgtgggggggagggtgtcacancncncagggcagcggngggcggacgcacaggcaggaaacggngcccggaaagnnggggcggnannttgccactggctggccatgcgggcgggcaggctaaacattnttgccgcgcaggcgca

SEQ ID NO: 843 - DNA, 62 bp, Homo sapiens
cgatggagcgtgggtagggagggtccacagtgtccactcgccgtgtgcgaaggttgactcgg

SEQ ID NO: 844 - DNA, 118 bp, Homo sapiens
ttgggtacactccctggtaccgggcccccccgatccggctgccagccctgaggccaagcacggctggagacccacgacctggcctgccgttgccctgagctgcagcctcggccccagg

SEQ ID NO: 845 - DNA, 99 bp, Homo sapiens
gtacactcccctggtaccgggcccccccactaccgagtcaaccttcgcacacggcgagtggacactgtggaccctccctacccacgctccatcgctcag

SEQ ID NO: 846 - DNA, 559 bp, Homo sapiens
  misc_feature 37, 552, 554: n = A,T,C or G
cggccgccctttttttttttttttggttgtggctganaatgctggagatgctcagttctctccctcacaaggtaggccacaaattcttggtggtgccctcacatctggggtcttcaggcaccagccatgcctgccgaggagtgctgtcaggacagaccatgtccgtgctaggcccaggcacagcccaaccactcctcatccaagtctctcccaggtttctggtcccgatgggcaaggatgacccctccagtggctggtaccccaccatcccactacccctcacatgctctcactctccatcaggtccccaatcctggcttccctcttcacgaactctcaaagaaaaggaaggataaaacctaaataaaccagacagaagcagctctggaacaaaaagtacaaaaagacagccagaggtgtgcggagagggtgaggtggccgcgtggacgtgggtagataatcgcatgcagcactggaactcctgatgaggggtggggtccccacttctcctcaaggtttgagggattggggggagggggtcagctgactcananaagta

SEQ ID NO: 847 - DNA, 430 bp, Homo sapiens
cggccgccacgctggttttgcatcttcaggagacgctcgtagccctcgcgcttctcctcggccagttcgcggaagaagtggctcacgccttccagagccacatcatcgcggtcgaaatagaagcccagagagaggtaggtgtaggaggcctgcaggtacaaattgaccaggctgttgacggctgcctccacgtcggtggaataattctgacgaatctgggagctcatggttggttggcaagaaggagctaaccacaaaaacggtgctggcaggtcccagaagcaggagatggccgagaagatggtcccggaggttgcaagcggagaggaaatcggagggcggtcggaggctggaagagagtccccggatctgttccgtccaaacactgttgaagcaagagacagacccgcgggacgtcgacgcggccgcg

SEQ ID NO: 848 - DNA, 546 bp, Homo sapiens
  misc_feature 146, 162: n = A,T,C or G
agagtaaagtgcagcctctccagacactggggccccagtgggcgtgggcgaagttgctggtaggaggagttggcggaagcacttggaactcctttataagtgtcagctgtgagattttaatttgatttgaaaatgagtaagtgcanaaagacaccagttcancagctagcaagtcccgcgtcattcagcccagatattcttgctgacatttttgaactctttgccaagaacttttcttatggcaagccacttaataatgagtggcagttaccagatcccagtgagattttcacctgtgaccacactgaatttaatgcatttcttgatttgaagaactccctaaatgaagtaaaaaacctactgagtgataagaaactggatgagtggcatgagcacactgctttcactaataaagcggggaaaatcatttctcatgttagaaaatctgtgaatgctgaactttgtactcaagcatggtgtaagttccatgagattttgtgcagctttccacttattccacaggaagcttttcagaatggaaaactg

SEQ ID NO: 849 - DNA, 196 bp, Homo sapiens
gaagtccttcagcaggccacgctcggacagggtgcgcctcaaggacttctttctgatgagggggaccttgtacatgatgcactcagagagcgccaccagacccagcagcagcagccacttcatggttcttcccgggtcccaactcgagggagaaggcgtcgacgcggccgcgaattccaccacactggactagtgg

SEQ ID NO: 850 - DNA, 543 bp, Homo sapiens
cactgatattggagaaaagcacatccggcataaagtgtaaaccagtgtctcaaacactggaagaaccgggagagcaaacatgatttttcttatttcctctaagtaatctttctttagtaaaacaacaagtgatctttggcatagattcatactttaaaggcattaatattgcatttatatcaggcaagcaactatacaaatatgctgagggccttgaaaataatcatcctcattttaaaggaaatagtgaaagcctgagtgtaaaggaccaacttaagttgtacacattcgatgttgggaactaacacacagcgatgggtgggaaggaaggatgttcaggcaaggttcttactcctttactcatctggttctggctttgggaaaaaataaggtttcatgtgctgggaaatacttagcagtaataagtaccaaaaaggaaacactgccctctcattttgcctagtaggaacttactgtggtgataagaaatatgaaacccattactctcttgaaccccatacttgggagtagatgcagagagct

SEQ ID NO: 851 - DNA, 190 bp, Homo sapiens
aggcggagaggatcatgtccgggaactgcggggtagtagcgatctgggttacccagccgttgtggcccttgagggtgccacgaagggtcatctgctcagtcatggcggcggcgagagcgtgtgtcgctgcagcgacgaggatggcactggatggcttagagaaactagcaccacaacctctcctgccgcc

SEQ ID NO: 852 - DNA, 407 bp, Homo sapiens
  misc_feature 38: n = A,T,C or G
aggcctcacagaggcgggggcagaaggcggcgacccanagccgccacatcccccgccttgggcgccgtcacagtccccagacgccctggactcctgcagtctacgaagacgcgcgggggacggcgtggttccgagagagggcgccaaaggcgacgtgccggccgccagctccaggccgagccccgagcgcctgcaggaacaggccccttcacccggcgcgggacgcagagctgcgagagaatcttgttcagcgcggactcaacgccagggcgccgcctagaggttggtctctgtctcggcctcacccgccgggagaccacagagctgcttccccagccgcccgccgccagaaattggaaaaaaaaaaatccagctggggtctaggaactcggcttctggcacctctg

SEQ ID NO: 853 - DNA, 626 bp, Homo sapiens
acagtcccagtactctttgctcagctttcggggccggcctcgtttccgcttcccgtgcttgggatcccccttcttgcagtcacgaaaaccatcgctggggaagagcttgccatcagtgggatccaggtccacgtcacttccaccggagtctgaggagtgggagctccgagaagcaccagtccctgcggtggagacgtcagagctgccgggggagggggctcctgcgccacagctgccggggtggtaggggctggcttgctgaccgtcgtccagcagctcctgggcaaaggggctgccctggtcaaagggccctgggtctagggcctcctggaaggccatgccatccttctccagcagctcaatgatccaactgagctcatcagaagagctggaagtgaggtctcgcagctgggcatggagttggtcccccagaggcccaaagaccagacgcagctcctcaagggcacaattgcagagggtggcgccatccatgtcacatcgtgagaagtcaatggcgcttgcgtcgtacttgttcttctccacttggtagctgatccagtccagaacctgcgtcttcgaccagaactggggctgttcccccaaccagctggccttctctgtaccct

SEQ ID NO: 854 - DNA, 218 bp, Homo sapiens
atgacggctgcccgaagccccccgagattgcacatggctatgtggagcactcggttcgctaccagtgtaagaactactacaaactgcgcacagaaggagatggagtatacaccttaaatgataagaagcagtggataaataaggctgttggagataaacttcctgaatgtgaagcagtatgtgggaagcccaagaatccggcaaacccagtgcagcgg

SEQ ID NO: 855 - DNA, 50 bp, Homo sapiens
gaggaacgaagaataaaggagattgtgaagaaacattctcagtttattgg

SEQ ID NO: 856 - DNA, 116 bp, Homo sapiens
tccactagtccagtgtggtggaattcgcggccgcgtcgacgccccgcgagcacagagcctcgcctttgccgatccgccgcccgtccacacccgccgccagctcaccatggatgatg

SEQ ID NO: 857 - DNA, 402 bp, Homo sapiens
ggcgacgaccccaagagggaggtgggccacgatttctacttcttttttcaccattcgacagttccactcttacacggcagccacatagtgttcttccatctagctctcggactgcatcagctgcatctcggggatcttcaaattcaacaaaagcaaagccgggtgggtttctagcaacccacacacttcggagtggtccatagtagccaaaagcccgttccaattccgtcttgttgccattgtttccaagattgcctacataaaccttacagtccaatggacaggaatcacgatgcatttcgagatctagggttaaaaaatgcggcggctcaaatccacacgctccgatgagtcttcccgctttcctccggcccaacaccaaccaacgtcgacgcggccgcg

SEQ ID NO: 858 - DNA, 172 bp, Homo sapiens
acattttatgacctctcccaataggggcagaggtgagcacccctggtgaaaagttaagactcagtgagtataaatacgccaagaagagctgtggcttctttcactggtgtcctcagaaaggctgtgagcagtgttggtggcatacctgtcacagcatctagcaaagcacctg

SEQ ID NO: 859 - DNA, 196 bp, Homo sapiens
aggcggagaggatcatgtccgggaactgcggggtagtagcgatctgggttacccagccgttgtggcccttgagggtgccacgaagggtcatctgctcagtcatggcggcggcgagagcgtgtgtcgctgcagcgacgaggatggcactggatggcttagagaaactagcaccacaacctctcctgccgccggtcga

SEQ ID NO: 860 - DNA, 538 bp, Homo sapiens; identical to SEQ ID NO: 838
  misc_feature 480: n = A,T,C or G

SEQ ID NO: 861 - DNA, 204 bp, Homo sapiens
aggcggagaggatcatgtccgggaactgcggggtagtagcgatctgggttacccagccgttgtggcccttgagggtgccacgaagggtcatctgctcagtcatggcggcgacgagagcgtgtgtcgctgcagcgacgaggatggcactggatggcttagagaaactagcaccacaacctctcctgccgcgtcgacgcggccgcg

SEQ ID NO: 862 - DNA, 217 bp, Homo sapiens
aatgtcaggggtgttgggggctttggctgggtcctgggtcttcgtgtagagacctggaggcgcttggttcttggggttctccaggattccagcctcgtagctgatgtgcatgaggttctcatccatgctccacgggttcttgggagtgaccgggatgggaatcccgtgttgctttgcgtactccatcaggtcattgcggcccttgaaccggttgtag

SEQ ID NO: 863 - DNA, 192 bp, Homo sapiens
aggcggagaggatcatgtccgggaactgcggggtagtagcgatctgggttacccagccgttgtggcccttgagggtgccacgaagggtcatctgctcagtcatggcggcggcgagagcgtgtgtcgctgcagcgacgaggatggcactggatggcttagagaaactagcaccacaacgtcgacgcggccgcg

SEQ ID NO: 864 - DNA, 147 bp, Homo sapiens
tttccccttgaagaagtagacccgctcccggccactgtagctatgggcagggagggccaaggctgcatccacgttgtccgggatgccatcgaagccgtcagagatatttcgggggtaatcagggtccaggacaccatcctcaaagcg

SEQ ID NO: 865 - DNA, 446 bp, Homo sapiens
cggccgctggacttggcttgagctgtgaggggtgggaggggaggatagcaccggaagatgctgctccgggcccaacaccagccctggccaggctctcccctcccaggggcagcgcccagtccccaggggctgccagagccctgtgtgccttgccgcattcccctgatgcagcttttggcaactgaaaggcagggctctcgctgagtgcacctggggcttcctgagcccatctgcggcggccccaccctggcctaggtgctgagtgcagctgctgcagacagcccctccctccttagtggagcctggagggtggggtgctcggggatgcaggcaggggcaggggctccagagccacaggtcagaagcagggctgggggaggggtggagccattcagcctcaggcaccctcacagctaggtgactaggggcagggacagaatggggtg

SEQ ID NO: 866 - DNA, 87 bp, Homo sapiens
tccctcaactggaccatgggcctgcccaccgacaatggccacgacagcgaccaggtgtttgagttcaacggcacccaggcagtgagg

SEQ ID NO: 867 - DNA, 123 bp, Homo sapiens
  misc_feature 2: n = A,T,C or G
cncctggtaccgggcccccccactttaaaatcttttgttaagaaataggaaagattaggaaatatcatactgcacctgaaatgctgcagcaggggtttttgtttgcttgtttttgtccttcag

SEQ ID NO: 868 - DNA, 634 bp, Homo sapiens
caggctgcggtaggtggcaatctcctgctccagccgcgacttgatgtccatgagccgctggtactcctgattctgccgctcactatcagctcgcacatcgcccagctgggcttcaataccgctgatcagcgcctggatatgcgccagctgggctccaaagcgcgcctccgtttctgccagtgtgtcttccaaggcagctttcatgctcagctgtgactgcagctcaatctcaagaccctgaagggtgcgccgcaggtcagtaacctcggacctgctcatctggagctgctccgtgtggccagcgacctcccggttcaattcttcagtccggctggtgaaccaggcttcagcatccttccggttctgctcggccatgacctcatattggcttcgcatgtcactcaggatcttggcgagatcggtgcccggagcggaatccacctccacactgacctggcctcccacttggcccctcagcgtactgatttcctcctcatggttcttcttcaggtaggccagctcttccttcaggccttcgatctgcatctccaggtcggtcctggccagggtcagctcatccagcaccctgcgcaggccgttgatgtcggcctccacgctcatgcgcagagcctgt

SEQ ID NO: 869 - DNA, 197 bp, Homo sapiens
aggcggagaggatcatgtccgggaactgcggggtagtagcgatctgggttacccagccgttgtggcccttgagggtgccacgaagggtcatctgctcagtcatggcggcggcgagagcgtgtgtcgctgcagcgacgaggatggcactggatggcttagagaaactagcaccacaacctctcctgccgccgtcgacg

SEQ ID NO: 870 - DNA, 579 bp, Homo sapiens
  misc_feature 155, 215, 224, 246, 262, 272, 288, 313, 316, 382, 426, 433,469, 482, 483, 507, 518, 521, 530, 564: n = A,T,C or G
cggccgcccttttttttttttttttttttttttttatggggccaattttaaatagttttatttaagacattgcattttccacttacaatacagtgtttataaagtgcaatgttatttccttcccctgtgcatatgttccatattcaagtattganaatgcccagtaacttactatagcagcttaactttttaaaactgccacagaatttgctacnaatttaggnccttcaaatgttttaaatgtgnggaacaatgctacatntacacttggntggcttaatcaacctnttcaatggggggccctgaggaagcnccnccagagggaggagctccaccaccaggaaatcccccaggcattcctcctggcatgcctcctgcactntggtacagcttggtgatgatggggttgcaaactttctccagctntttctgntgatgttcaaattcttccttctcagcagtctgattnttatcaagccagnngataatttcattacacttgtccanaatcttctgtntgncctcatcgntaatcttgccttgaagtttctcatcttcaacagntgctttcatgttgaa

SEQ ID NO: 871 - DNA, 518 bp, Homo sapiens
ctttctccttcttatagacgttccggacgggcatgaccggtccggtcagctgggtggccagtttcagttcttcagcagaactgtctcccttcttgggggccgagggcttcctggggaagaggatgagtttggagcggtactccttcagccgctgcacgttggcctgcagggactccgtggacttgttccgcctcctcggatccacagaaatgccgatggtccgggccaccttcttgtgaatgccggccaccctgagctcctccaggctgaagccgcggccggcgcgcaccttcgtgtggtaccgaaccgtggggcagcgcacgatgggccggatgggacccgacgcggggcgcggggcgatgcggcgcgccttggcttgccgggccttacgtctgcggatcttacgggccggctggttgaaccacgtggccacgcgccgctgccagtccttgtggaagtggggcttcaagaccatgccattccggctgggcgccatggctgcctacggccctgcggct

SEQ ID NO: 872 - DNA, 404 bp, Homo sapiens
ctaaacactgtccagcgcaggggggtgctagggaggtagcgtgacaacacgatggctgcgatgcctgaagtgatgaccacgatggcggaagtgacagagaggatgttgaccacgcagtactgcagagccaccgcatcttgaggggtgcccacgtagcgcagcactgtgccatggaacagggcagctgtgatgaagctcacatggcccagcaccaccagcaccaggcctgtcttcatcagcaccttccggaagtcgcccacactcaggcctccgaggcgcagacacatgtcggctccgcgctggtcccgcccccggcttcagcgcggctcccgaggctgcgggccgccgggggaccctgctcccatcccgctggcccgtcgcccgcgcgccccgcaccgtcgcgt

SEQ ID NO: 873 - DNA, 175 bp, Homo sapiens
ggctgccagcgcctctaccccgtgctgcagcagagcctggtgcgggccgcccgccgcaggggcgccgccgcccagccctgaaccagaagcctgagcaactacggacgcaagccgaggaccgtgctgccgccgtccacgaaaagacccgcgccatcggcctccagtttgcgtcgag

SEQ ID NO: 874 - DNA, 215 bp, Homo sapiens
ggtagagaaccctgcggctgcgctttcggtgcccgcgagaggcgctggggcgcccggcaggggccgctgcgggctccgggagagggtcgaaggtgaagatctcaggaccggagccccgccggggtcccgggatggtggagggggccggggtcggggcctgcaggatggtcatggtcgggtggcagctgcgagagtgacacatggtgagccgagcg

SEQ ID NO: 875 - DNA, 208 bp, Homo sapiens; identical to SEQ ID NO: 834

SEQ ID NO: 876 - DNA, 484 bp, Homo sapiens
gagcagctggtttctcctggacagcagcatctggctccgctcccttcggaactccaggtactccttattgtttttgagcttgttcatgcagtccatgagggctgggtagccacctgagaatcgccacaggtgcactgcctggtcctgctccccataccacgtgttccagttgcccacgagtgagcatgggtagtcctcatccaggtgaagcttgggcagcacagcctccgtgaggctgttgtaggcatccaggtattcaggctttacattgtgaaactggatcttatagaggttgctggtttccttcttggacagcagggtggagtgggcatccttccggggatccactttgtgaacaaagagggagcggaaccagctgccttcattgtccttggaatagaaacgcgccgcagctgcagacgcaacgtccccagcgcgaggccccgggccccccagcagccgccgcgccgtcacagagatgctg

SEQ ID NO: 877 - DNA, 558 bp, Homo sapiens
ggcgtcctggtgcttaccacctggaaactggtgaggtggtgggagaactcctggtggaccctagtggaagccttccagtaatttcttgaagctgagcgctcaggtgagtagggcgacatctggtggccggttgttgaaggtcattgcagagaggaaggaagccgaggaggggagcctgcagtgagggcgtcctggggttctccggttctcaccacccttgggccacgccgtctagtccacacctgaggagttggtcaggtagaaggggcggatgaccgtgcggaagccgttgaagtgccctgccgggcaggggaaggaggaggtgctcttcgagctgttggtgtccagggcactgggaatcgcagccttccagccctcgaaatcggtgacgtctgccacgaagagcccttcgcagagcatcagggctttgttttcgtaggcaatggtgcgatctgagccgccagacttggtgaggcccaggacagggagctcgtccgaggagcaggagaagccgtagttccagcagctctggatggtggggaggtagaccagggacca

SEQ ID NO: 878 - DNA, 503 bp, Homo sapiens
  misc_feature 132, 185: n = A,T,C or G
cggccgcaaccgcgcgaacccgaagtcgatgattttcaccggggccccgggcgtgtcgtcggcgtacaggatgttctccggcttgaggtcgcggtgcaccacgcccgcctcctcgtgcatgaagctcacggncgacacgaggctgcgcaggatctggcttgcttccgactcgctgaagtgccgcntcttgcggatgtgctccagcagctccccgccccgcagcagctccaggaccaggtacgtgtgcagctggtcgtgatgcacctcgtgcagattcaccacgttggggtgtgactggcacaggcgcagggcagccacttcgcgctgcgtgttcgcctccagcctgcgactgaggatcttgactgcgaactcctggccgctctggcgctggcggcagcggcgacacacagaaaagctgccctggcccagcgcaggctcccgcaggtccagctcgtactgctggaagaagggcgagtcctgcatcatagcgctcctggccaccg

SEQ ID NO: 879 - DNA, 78 bp, Homo sapiens
ctgcctcggctggcgggcggggggaggcggagagctcggggcacgcgctgccgtccggaccgcgtcgacgcggccgcg

SEQ ID NO: 880 - DNA, 211 bp, Homo sapiens
tgatgtgggcgattgatgaaaaggcggttgaggcgtctggtgagtagtgcatggctaggaatagtcctgtggtgatttggaggatcaggcaggcgccaaggagtgagccgaagtttcatcatgcggagatgttggatggggtggggaggtcgatgaatgagtggttaattaattttattagggggttaattttgcggtcgacgcggccgcg

SEQ ID NO: 881 - DNA, 373 bp, Homo sapiens
  misc_feature 37, 38, 88, 335: n = A,T,C or G
cccacagtggcttgtttccgcagtgcgcggccgtcannacccaactctggtccaccaggacacccgcgcagtggaacgagaggccgtngaagagcgagacctgccagggctgcgagccgcgcgcgcacggggcgccataggcttcggggtccaagcgcgtgtcgttttgggggagcagcgccgcctctgcggcccagagttgcgccatcagcagcggcagcagcttcgccagagcccgggcgccagaggcggcggagaggtggaggtgcggagctctcatggccaggatctgggagtcgccgataggaaggagggaggggacccagacgtgcctntgccctgcctgtggtctgccgcgtccgacacggccgcg

SEQ ID NO: 882 - DNA, 300 bp, Homo sapiens
  misc_feature 48: n = A,T,C or G
cggccgcgttttttttttttttttcagacaattcagcctttattttanaaaataattctgtagcttccactttctttcatgaaactgaggtcaggcaagaaacaaaaatccaccaagtcctctccatcctgccatggcgtcctggcctgtgaggacatggggcgcctgggagcgggcggggaggctgggcagcactgggccagaggcgtcctggtcactgctccacctggtcactgctccacctcatgctgagaggagcctgtgtgtcaaaccccaggggaaaaagggacaggcagatcg

SEQ ID NO: 883 - DNA, 230 bp, Homo sapiens
ggtagagaaccctgcggctgcgctttcggtgcccgcgagaggcgctggggcgcccggcaggggccgctgcgggctccgggagagggtcgaaggtgaagatctcaggaccggagccccgccggggtcccgggatggtggagggggccggggtcggggcctgcaggatggtcatggtcgggtggcagctgcgagagtgacacatggtgagccgagcggtcgacgcggccgcg

SEQ ID NO: 884 - DNA, 601 bp, Homo sapiens
  misc_feature 555: n = A,T,C or G
gcccccaattccagctgccacaccacccacggtgactgcattagttcggatgtcatacaaaagctgattgaagcaaccctctactttttggtcgtgagccttttgcttggtgcaggtttcattggctgtgttggtgacgttgtcattgcaacagaatgggggaaaggcactgttctctttgaagtagggtgagtcctcaaaatccgtatagttggtgaagccacagcacttgagccctttcatggtggtgttccacacttgagtgaagtcttcctgggaaccataatctttcttgatggcaggcactaccagcaacgtcaggaagtgctcagccattgtggtgtacaccaaggcgaccacagcagctgcaacctcagcaatgaagatgaggaggaggatgaagaagaacgtcacgagggcacacttgctctcagtcttagcaccatagcagcccaggaaaccaagagcaaagaccacaacgccggctgcgatgaggaagtagcccacgttgacaaactgcatggcactggacgacagtggcccgaagatcttcanaaaggatgccccatcgattgacacccagatgcccactgccaacagg

SEQ ID NO: 885 - DNA, 207 bp, Homo sapiens
  misc_feature 82, 83, 101, 127, 128: n = A,T,C or G
caggcggagaggatcatgtccgggaactgcggggtagtagcgatctgggttacccagccgttgtggcccttgagggtgccannaagggtcatctgctcagncatggcggcggcgagagcgtgtgtcnntgcagcgacgaggatggcactggatggcttagagaaactagcaccacaacctctcctgccgccggtcgacgcggccgcg

SEQ ID NO: 886 - DNA, 442 bp, Homo sapiens
  misc_feature 3, 10, 14, 17, 37, 41, 88, 122, 123, 152, 158, 282, 388, 422: n = A,T,C or G
cancttatanaaanggnaaaggaaaccccaacatgcntgcnctgccttggtgaccagggaagtcaccccacggctatggggaaattancccgaggcttagctttcattatcactgtctcccnnggtgtgcttgtcaaagagatattccgccnagccanattcgggcgctcccatcttgcgcaagttggtcacgtggtcacccaattctttgatggctttcacctgctcattcaggtaatgtgtctcaatgaagtcacacaaatgggggtcatttttgtcagnggccagtttgtgcagttccagtagtgactgattcacatttttttccaaatgtaatgcacactccattgcattcagcccgctctcccagtcatcacagtctggtttnttgatatcctgaaggaagattcggccacctcgtnggttctgcagcttcatcagt

SEQ ID NO: 887 - DNA, 222 bp, Homo sapiens
gctcaggctccaaagccagcaggaaagaggtagctcgggacgtggagccgccgcccaggtgcgccaggaccacctcggccgtcaccttagccaggtggctgcttaggtccactgtgcgcttcacgtcctcattgatcagcggcggtgcctcggaggaggcgctgcccggcgccggggcccaagtcccaagcaacaggagcagaaacaagccggcggctggcg

SEQ ID NO: 888 - DNA, 89 bp, Homo sapiens
ggtggcgtagcgcccgcttataaagccgcaacaccttttgctgatgggtcaggtagggtcccgacgccaagaacgccattacggccgcg

SEQ ID NO: 889 - DNA, 451 bp, Homo sapiens
  misc_feature 5: n = A,T,C or G
gcggncgctggacttggcttgagctgtgaggggtgggaggggaggatagcaccggaagatgctgctccgggcccaacaccagccctggccaggctctcccctcccaggggcagcgcccagtccccaggggctgccagagccctgtgtgccttgccgcattcccctgatgcagcttttggcaactgaaaggcagggctctcgctgagtgcacctggggcttcctgagcccatctgcggcggccccaccctggcctaggtgctgagtgcagctgctgcagacagcccctccctccttagtggagcctggagggtggggtgctcggggatgcaggcaggggcaggggctccagagccacaggtcagaagcagggctgggggaggggtggagccattcagcctcaggcaccctcacagctaggtgactaggggcagggacagaatggggtgaatt

SEQ ID NO: 890 - DNA, 66 bp, Homo sapiens
tccactagtccagtgtggtggaattcgcggccgcgtcgacctgctgcctcacccacagcttttgat

SEQ ID NO: 891 - DNA, 599 bp, Homo sapiens
  misc_feature 583: n = A,T,C or G
gggcgtcctggtgcttaccacctggaaactggtgaggtggtgggagaactcctggtggaccctagtggaagccttccagtaatttcttgaagctgagcgctcaggtgagtagggcgacatctggtggccggttgttgaaggtcattgcagagaggaaggaagccgaggaggggagcctgcagtgagggcgtcctggggttctccggttctcaccacccttgggccacgccgtctagtccacacctgaggagttggtcaggtagaaggggcggatgaccgtgcggaagccgttgaagtgccctgccgggcaggggaaggaggaggtgctcttcgagctgttggtgtccagggcactgggaatcgcagccttccagccctcgaaatcggtgacgtctgccacgaagagcccttcgcagagcatcagggctttgttttcgtaggcaatggtgcgatctgagccgccagacttggtgaggcccaggacagggagctcgtccgaggagcaggagaagccgtagttccagcagctctggatggtggggaggtagaccagggaccaggacaccctcttgtcctggaagangaagctggggtgttgt

SEQ ID NO: 892 - DNA, 113 bp, Homo sapiens
gtctcaaacaggaccgcatttccggcatttcggctggtgtccgtgttagtggccacctgggccagcaagtcattcatggtctcactgctctcctcgtggttccggcccaggat

SEQ ID NO: 893 - DNA, 208 bp, Homo sapiens
  misc_feature 160: n = A,T,C or G
gaggcggagaggatcatgtccgggaactgcggggtagtagcgatctgggttacccagccgttgtggcccttgagggtgccacgaagggtcatctgctcagtcatggcggcggcgagagcgtgtgtcgctgcagcgacgaggatggcactggatggcttanagaaactagcaccacaacctctcctgccggtcgacgcggccgcgaatt

SEQ ID NO: 894 - DNA, 67 bp, Homo sapiens
  misc_feature 9: n = A,T,C or G
gcgatggancgtgggtagggagggtccacagtgtccactcgccgtgtgcgaaggttgactcggtagt

SEQ ID NO: 895 - DNA, 58 bp, Homo sapiens
  misc_feature 50, 52: n = A,T,C or G
gcggccgcccttttttttttttttttttttttttttttttttttttcccncnctaaaa

SEQ ID NO: 896 - DNA, 177 bp, Homo sapiens
  misc_feature 24, 63, 84, 87: n = A,T,C or G
gacattttatgacctctcccaatnggggcagaggtgagcacccctggtgaaaagttaagactnagtgagtataaatacgccaanaanagctgtggcttctttcactggtgtcctcagaaaggctgtgagcagtgttggtggcatacctgtcacagcatctagcaaagcacctgaatt

SEQ ID NO: 897 - DNA, 542 bp, Homo sapiens
gctttctccttcttatagacgttccggacgggcatgaccggtccggtcagctgggtggccagtttcagttcttcagcagaactgtctcccttcttgggggccgagggcttcctggggaagaggatgagtttggagcggtactccttcagccgctgcacgttggtctgcagggactccgtggacttgttccgcctcctcggatccacagaaatgccgatggtccgggccaccttcttgtgaatgccggccaccctgagctcctccaggctgaagccgcggccggcgcgcaccttcgtgtggtaccgaaccgtggggcagcgcacgatgggccggatgggacccgacgcggggcgcggggcgatgcggcgcgccttggcttgccgggccttacgtctgcggatcttacgggccggctggttgaaccacgtggccacgcgccgctgccagtccttgtggaagtggggcttcaagaccatgccattccggctgggcgccatggctgcctacggccctgcggctcctggtcgacgcggccgcgaatt

SEQ ID NO: 898 - DNA, 165 bp, Homo sapiens
  misc_feature 3, 5, 40, 77, 79, 89, 96, 123: n = A,T,C or G
tancnatctgggttacccagccgttgtggcccttgagggngccacgaagggtcatctgctcagtcatggcggcggcnanagcgtgtgtngctgcancgacgaggatggcactggatggcttanagaaactagcaccacaacctctcgtcgacgcggccgcgaatt

SEQ ID NO: 899 - DNA, 67 bp, Homo sapiens
tccactagtccagtgtggtggaattcgcggccgcgtcgacgctgctgcctcacccacagcttttgat

SEQ ID NO: 900 - DNA, 77 bp, Homo sapiens
cttccaggtccagagctcccaggtttccaggttgcagtccctccagtcccagagctcccagggtttcggtttccagt

SEQ ID NO: 901 - DNA, 114 bp, Homo sapiens
gggccggggaggacggctgggggctccggggtcgcctgcacaattgcctgagcaggaggcgcaagtgggagatgacgataaagggcggggccagcgcgggccgagagtggaatt

SEQ ID NO: 902 - DNA, 64 bp, Homo sapiens
tacactactcctgaggatgctactcccgagcccggagaggacccacgcgtgacccgggccaagt

SEQ ID NO: 903 - DNA, 63 bp, Homo sapiens
tcaaaagctgtgggtgaggcaggtcgacgcggccgcgaattccaccacactggactagtggat

SEQ ID NO: 904 - DNA, 142 bp, Homo sapiens
tcctcagccagggagacagggaccaggcagcacaggcctgccagcaggaggatgccccacgagacagaagacggcattgtcgattcactgtcccaggtcaggtcgacgcggccgcgaattccaccacactggactagtggat

SEQ ID NO: 905 - DNA, 101 bp, Homo sapiens
tccactagtccagtgtggtggaattcgcggccgcgtcgacgccacctccgagagcctggatgtgatggcgtcacagaagagaccctcccagaggcacggat

SEQ ID NO: 906 - DNA, 506 bp, Homo sapiens
  misc_feature 233, 273, 302: n = A,T,C or G
gcggccgcacacacagccaggcgctaggctccctgcgggacctcgggaagggggaagagcgtcaacaatttacggagggtccagccgctgggtcagattgagacaaaccattgtgtggttgggtttgggtcagcaggctggagagggttctgttctttttgatcattatcgtttggggccccaagggagggtcttgggagccacctgagccccaaagctgggaaattcctcanagctgctcatgtcaggagccttctcactgctgctggcggnccagggtgcgtcccgcaccacaaagcctntggaaggtgccttggcctcttcgtgtgctgggggtttcatgtatacctgcagcgcctcactgtccaccacgtcagctaggtattcctcctccagattgaggatgtggtcgatggcttcctccacattctctgggagccccgtcacagtgacgcagttggggtctggggctccgctctgtgggaagcgaatgtccaccttgaatt

SEQ ID NO: 907 - DNA, 93 bp, Homo sapiens
tcccgctgcacaagttcacgtccatccgccggaccatgtcggaggttgggggctctgtggaggacctgattgccaaaggccccgtctcaaagt

SEQ ID NO: 908 - DNA, 238 bp, Homo sapiens
gggtagagaaccctgcggctgcgctttcggtgcccgcgagaggcgctggggcgcccggcaggggccgctgcgggctccgggagagggtcgaaggtgaagatctcaggaccggagccccgccggggtcccgggatggtggagggggccggggtcggggcctgcaggatggtcatggtcgggtggcagctgcgagagtgacacatggtgagccgagcggaggtcgacgcggccgcgaatt

SEQ ID NO: 909 - DNA, 190 bp, Homo sapiens
  misc_feature 25, 56, 92, 97, 125, 132, 137, 140, 149, 150, 152, 175, 181: n = A,T,C or G
gggcgtcctggtgcttaccacctgnaaactggtgaggtggtgggagaactcctggnggaccctagtggaagccttccagtaatttcttgaanctgancgctcaggtgagtagggcgacatctggnggccggntgttnaangtcattgcnnanaggaaggaagccgaggaggggancctgcngtgagggcg

SEQ ID NO: 910 - DNA, 93 bp, Homo sapiens; identical to SEQ ID NO: 907

SEQ ID NO: 911 - DNA, 261 bp, Homo sapiens
gggtccgtcagggctgaagacctgcccaggcacacaactcaccacggccggtagcccattctcgcaggtgacattcttcatggggtccagtgacacctgggggcccagcttgcagctggagatgtgggcctctgtgccggtgcagtccatggagaatggccagtagcgctgcttcctccgtgaggcaaacattttgtacactttggtattgtatgtcctctccccagggaagccaaacatgccgcagaccacgcgggaatt

SEQ ID NO: 912 - DNA, 67 bp, Homo sapiens
gcgatggagcgtgggtagggagggtccacagtgtccactcgccgtgtgcgaaggttgactcggtagt

SEQ ID NO: 913 - DNA, 545 bp, Homo sapiens
gctttctccttcttatagacgttccggacgggcatgaccggtccggtcagctgggtggccagtttcagttcttcagcagaactgtctcccttcttgggggccgagggcttcctggggaagaggatgagtttggagcggtactccttcagccgctgcacgttggcctgcagggactccgtggacttgttccgcctcctcggatccacagaaatgccgatggtccgggccaccttcttgtgaatgccggccaccctgagctcctccaggctgaagccgcggccggcgcgcaccttcgtgtggtaccgaaccgtggggcagcgcacgatgggccggatgggacccgacgcggggcgcggggcgatgcggcgcgccttggcttgccgggccttacgtctgcggatcttacgggccggctggttgaaccacgtggccacgcgccgctgccagtccttgtggaagtggggcttcaagaccatgccattccggctgggcgccatggctgcctacggccctgcggctcctgcgcgtcgacgcggccgcgaatt

SEQ ID NO: 914 - DNA, 295 bp, Homo sapiens
gctcggcatcagaccagttcctcagcttcctgaagtaaccatagcaattggacttgtggtaaaaccatccaggagcacagctgggtctcatgatgatatcacccaggactcctgttttggccaggcagctcagcaataggagcagccgcatgcttctggaagccatcttcctcctaccctgaggatgtagctagtgcaaggatctcagagaccttactagcgcttctttgaaactcctgggttctccttgatctgcaaatctgtttggcaaccaaggtcgacgcggccgcgaatt

SEQ ID NO: 915 - DNA, 391 bp, Homo sapiens
gctaaacactgtccagcgcaggggggtgctagggaggtagcgtgacaacacgatggctgcgatgcctgaagtgatgaccacgatggcggaagtgacagagaggatgttgaccacgcagtactgcagagccaccgcatcttgaggggtgcccacgtagcgcagcactgtgccatggaacagggcagctgtgatgaagctcacatggcccagcaccaccagcaccaggcctgtcttcatcagcaccttccggaagtcgcccacactcaggcctccgaggcgcagacacatgtcggctccgcgctggtcccgcccccggcttcagcgcggctcccgaggctgcgggccgccgggggaccctgctcccatcccgctgtcgacgcggccgcgaatt

SEQ ID NO: 916 - DNA, 559 bp, Homo sapiens
  misc_feature 538, 544: n = A,T,C or G
gggcgtcctggtgcttaccacctggaaactggtgaggtggtgggagaactcctggtggaccctagtggaagccttccagtaatttcttgaagctgagcgctcaggtgagtagggcgacatctggtggccggttgttgaaggtcattgcagagaggaaggaagccgaggaggggagcctgcagtgagggcgtcctggggttctccggttctcaccacccttgggccacgccgtctagtccacacctgaggagttggtcaggtagaaggggcggatgaccgtgcggaagccgttgaagtgccctgccgggcaggggaaggaggaggtgctcttcgagctgttggtgtccagggcactgggaatcgcagccttccagccctcgaaatcggtgacgtctgccacgaagagcccttcgcagagcatcagggctttgttttcgtaggcaatggtgcgatctgagccgccagacttggtgaggcccaggacagggagctcgtccgaggagcaggagaagccgtagttccagcagctctggatggnggggangtagaccagggacca

SEQ ID NO: 917 - DNA, 447 bp, Homo sapiens
  misc_feature 284, 287, 336, 360, 374, 392, 397, 400, 409: n = A,T,C or G
gctccttggcgagcacgtgaccccggcgggcacgcaggagggcaggcaggcccctgcgcaggcgctgggtggactgcttccaggtgtcatattggaagaacttgcccacggggtatctggggaagttgtccggaagcacggtcggaggggtcgacacgtccctctcggacttggcgggggtagcacagtacgtctccaggagggccaggtcacagctgcggaaacagcactcctcaacgatgccacggctgcgacggctcacacggcttgcgggcctgctgaantanaagccgcggtccccacagacgaactggagggtgtccaccagctccccgncgcacagggtctcactggggcggnaagcagcaatgcancacgaggcgaaggccaanaaggnganaagcaccancatcgacttccccattgggattcccattggtgtctgga

SEQ ID NO: 918 - DNA, 574 bp, Homo sapiens
gctccttggcgagcacgtgaccccggcgggcacgcaggagggcaggcaggcccctgcgcaggcgctgggtggactgcttccaggtgtcatattggaagaacttgcccacggggtatctggggaagttgtccggaagcacggtcggaggggtcgacacgtccctctcggacttggcgggggtagcacagtacgtctccaggagggccaggtcacagctgcggaaacagcactcctcaacgatgccacggctgcgacggctcacacggcttgcgggcctgctgaagtagaagccgcggtccccacagacgaactggagggtgtccaccagctccccgccgcacagggtctcactggggcggtaagcagcaatgcagcacgaggcgaaggccaagaaggtgagaagcaccagcatcgacttccccattgggattcccattggtgtctggaagccggcgacgctgccgcccacctccctgctgcgtgtcgcaaaccgaacagcgggcgttggccctcctgccggacactcctctgccagcgccgctctggccgagtcgcgggggccgaatgtgcgacg

SEQ ID NO: 919 - DNA, 139 bp, Homo sapiens
gccgcgctcgtcgtcgacaacggctccggcatgtgcaaggccggcttcgcgggcgacgatgccccccgggccgtcttcccctccatcgtggggcgccccaggcaccagggcgtgatggtgggcatgggtcagaaggatt

SEQ ID NO: 920 - DNA, 576 bp, Homo sapiens
  misc_feature 526, 553, 556, 571: n = A,T,C or G
ggtggacaccaccctcaagagcctgagccagcagatcgagaacatccggagcccagagggcagccgcaagaaccccgcccgcacctgccgtgacctcaagatgtgccactctgactggaagagtggagagtactggattgaccccaaccaaggctgcaacctggatgccatcaaagtcttctgcaacatggagactggtgagacctgcgtgtaccccactcagcccagtgtggcccagaagaactggtacatcagcaagaaccccaaggacaagaggcatgtctggttcggcgagagcatgaccgatggattccagttcgagtatggcggccagggctccgaccctgccgatgtggccatccagctgaccttcctgcgcctgatgtccaccgaggcctcccagaacatcacctaccactgcaagaacagcgtggcctacatggaccagcagactggcaacctcaagaaggccctgctcctccagggctccaacgagatcgagatccgcgccgagggcaacagccgnttcacctacagcgtcactgtcgatggntgnacgagtcacaccggnagcct

SEQ ID NO: 921 - DNA, 421 bp, Homo sapiens
  misc_feature 387, 408, 409, 413, 419: n = A,T,C or G
gcgcatctgcccgccctagtcggggaagagcaggaagccggagaagacgctgtcagagccctggatgcccaccatgtcgtagtagtcattgacagccagccacacctcctcgcccacctgcaacctcagcagcacaccgcccgagttgacctgattggttttggacgtgtggccacagaaggtgaccactttgacgccgctgcggtacagcagcacgcacaggttggctgtatgcgacgcgtggtagacaaagtagtagaggccggggactttgcaggtgaacttgccagtgctcgtgtcataatctccctgcgggttggtgaggaccgcgttgaatctgatcaggctgttgggtgcagggggctggtgggtctgccgagtgaccgngaacactgactggaatttctnnttgnatctgncc

SEQ ID NO: 922 - DNA, 177 bp, Homo sapiens
gacattttatgacctctcccaataggggcagaggtgagcacccctggtgaaaagttaagactcagtgagtataaatacgccaagaagagctgtggcttctttcactggtgtcctcagaaaggctgtgagcagtgttggtggcatacctgtcacagcatctagcaaagcacctgaatt

SEQ ID NO: 923 - DNA, 133 bp, Homo sapiens
tccactagtccagtgtggtggaattcgcggccgcgtcgacgcgagcagcggcggcggcgcggagagacgcagcggaggttttcctggtttcggaccccagcggccggatggtgaaatcctccctgcagcggat

SEQ ID NO: 924 - DNA, 216 bp, Homo sapiens
gggtagagaaccctgcggctgcgctttcggtgcccgcgagaggcgctggggcgcccggcaggggccgctgcgggctccgggagagggtcgaaggtgaagatctcaggaccggagccccgccggggtcccgggatggtggagggggccggggtcggggcctgcaggatggtcatggtcgggtggcagctgcgagagtgacacatggtgagccgagcg

SEQ ID NO: 925 - DNA, 649 bp, Homo sapiens
  misc_feature 441, 510, 603: n = A,T,C or G
ggcccccaattccagctgccacaccacccacggtgactgcattagttcggatgtcatacaaaagctgattgaagcaaccctctactttttggtcgtgagccttttgcttggtgcaggtttcattggctgtgttggtgacgttgtcattgcaacagaatgggggaaaggcactgttctctttgaagtagggtgagtcctcaaaatccgtatagttggtgaagccacagcacttgagccctttcatggtggtgttccacacttgagtgaagtcttcctgggaaccataatctttcttgatggcaggcactaccagcaacgtcaggaagtgctcagccattgtggtgtacaccaaggcgaccacagcagctgcaacctcagcaatgaagatgaggaggaggatgaagaagaacgtcacgagggcacacttgctctcagtcttancaccatagcagcccaggaaaccaagagcaaagaccacaacgccggctgcgatgaggaagtagcccacgntgacaaactgcatggcactggacgacagtggcccgaagatcttcagaaaggatgccccatcgattgacacccagatgcccactgccaacaggnctgcaccacacagaaagatgagcaaattgaagaggatcatcatggt

SEQ ID NO: 926 - DNA, 341 bp, Homo sapiens
gggtcctcaaactctcgaatgtacggcgcaatgccacaataaggttgattgtggtgtttttcatgtggcagtttctccaggggtggcaggtatggaatagggtcacggggggcaaagagggccagaaggttgggcggcaggaactgggtcatcttgccaagtcgcgtagcgccctcctcgctctggcgtctgtccggaggctcgcggcggctgcggcagcccctcagcaacaacaactcctgcttcggcttccactccgggggcgtccacgtccgtctgattccgtcgcccgctaagcgagcgcaccagaccgctgctcagcgtcgacgcggccgcgaatt

SEQ ID NO: 927 - DNA, 431 bp, Homo sapiens
  misc_feature 265, 298: n = A,T,C or G
gcggccgccacgctggttttgcatcttcaggagacgctcgtagccctcgcgcttctcctcggccaattcgcggaagaagtggctcacgccttccagagccacatcatcgcggtcgaaatagaagcccagagagaggtaggtgtaggaggcctgcaggtacaaattgaccaggctgttgacggctgcctccacgtcggtggaataattctgacgaatctgggagctcatggttggttggcaagaaggagctaaccacaaaaacggngctggcaggtcccagaagcaggagatggccganaagatggtcccggaggttgcaagcggagaggaaatcggagggcggtcggaggctggaagagagtccccggatctgttccgtccaaacactgttgaagcaagagacagacccgcggtcgacgcggccgcgaatt

SEQ ID NO: 928 - DNA, 538 bp, Homo sapiens
gtggcctgcaaggccgcggacagggcgagcaccgagtcgtacattttgcagctcatcatccccgtgctctgcgtgacgcagtccatccacagccccttgtacatggcctgggccgtgatgatgttgtcacccgcataggagctcatctgccactgcgggatggcggtgcaggccaccagacccacccagcccagcagggccatggagaagcccagcaactgcaggcccgaattggccatttccgccctcagaaaacactgggggcgccgggcgggagaccctacagtaaaacaaacgacacttggggggcagccccacaaaagaaaacttgaggtggagttttccggtcacccaaagagacaaaaagggtttgggccaggtgaatgcaaatcttgtcaccaaactacacacaaatcgacccctccagtgaagcgatggcctcgcggcacagggagtaggatacgccgggagggtggttccagacaaaattggtggtccccgaaggccaggcggttccctccgggcgctctcggcgacc

SEQ ID NO: 929 - DNA, 69 bp, Homo sapiens
ctcctcgaccaccagcttgcactggcagtagttgagcagcagcggcgtgatctgcttgtccagctggat

SEQ ID NO: 930 - DNA, 544 bp, Homo sapiens
gctttctccttcttatagacgttccggacgggcatgaccggtccggtcagctgggtggccagtttcagttcttcagcagaactgtctcccttcttgggggccgagggcttcctggggaagaggatgagtttggagcggtactccttcagccgctgcacgttggcctgcagggactccgtggacttgttccgcctcctcggatccacagaaatgccgatggtccgggccaccttcttgtgaatgccggccaccctgagctcctccaggctgaagccgcggccggcgcgcaccttcgtgtggtaccgaaccgtggggcagcgcacgatgggccggatgggacccgacgcggggcgcggggcgatgcggcgcgccttggcttgccgggccttacgtctgcggatcttacgggccggctggttgaaccacgtggccacgcgccgctgccagtccttgtggaagtggggcttcaagaccatgccattccggctgggcgccatggctgcctacggccctgcggctcctgcggtcgacgcggccgcgaatt

SEQ ID NO: 931 - DNA, 596 bp, Homo sapiens
  misc_feature 538: n = A,T,C or G
gttgctgcagtggcttgggcgtcaggaggctcactgagggggccacatgaccccagccagtgacagtgcagtggaggccgttggggaaggaggcgttggctgcagggaggcagatgggccggatgtagcgggagaaggtgatgggtctgctgagttggaggagtgcaatgtcgccctgggagccctcctggaggtagctggggtgggggatgatgtccttcagggtgctgaccttggcgtcctcggagtaggagtctagctggtgggcccccagcttgacctcataggcttccttgtggtgctcgctggggaagcagtgagcagctgacagcacccactgctcagacacgagagagccaccacacacatggacgccttcataggtgatgctgacctgccagggccactgaccggcgactgcactgctgccacctgtgatgcgtgcttggggggccacaccgcagggagcttctgccccttccgctcctgtccccgaccggagtaatccaagatagagcagaatggccacagcccccanctgcccaggccccaggacccccttctgggccatggcccaggacaagggcccctggggc

SEQ ID NO: 932 - DNA, 153 bp, Homo sapiens
tctgtgctggggtctgggctccgtggagagatgtgtaggggtaatgagaaattgatcagcaatgagaggtggactctgagccacctccctgaccctgaatcattcaagcgaggagcagaggagctcttgactgggggacggggatgtgaggat

SEQ ID NO: 933 - DNA, 112 bp, Homo sapiens
tcaaacttgccattgttaaaagcagccacattttggacctgcagtttcctcagaaatagttaggattctgtgtcgacgcggccgcgaattccaccacactggactagtggat

SEQ ID NO: 934 - DNA, 74 bp, Homo sapiens
gtggccatcgagtccccatcctggtcggccacccggaaacgccgctcgtcccgaggtcgacgcggccgcgaatt

SEQ ID NO: 935 - DNA, 380 bp, Homo sapiens
gcggccgccatcttggtccttttccaccattttcagcccctccagggcttggaggacccggcgggccacactcttggagcctcggctgaagtggctgggcatgacgccgtttctctgacgtcccccatagatcttggtcatggagccaaccccagcgccaccccggaggtacaggtgccgcgctgtggaagcagctcgcgtgtagaaccagttctcatcgtagggagcaagctctttgtgcttggccagcttgacggtatccacccattcggggactttcagcttcccggactttttgaggaaggctgccagagctctgacgaactcctgctggttcacgtcttttacagtaactccaggcatcgtgcggcctccgcgcg

SEQ ID NO: 936 - DNA, 155 bp, Homo sapiens
ctggcgctttgaggatggtgtcctggaccctgattacccccgaaatatctctgacggcttcgatggcatcccggacaacgtggatgcagccttggccctccctgcccatagctacagtggccgggagcgggtctacttcttcaaggggaaacagt

SEQ ID NO: 937 - DNA, 213 bp, Homo sapiens
gaggcggagaggatcatgtccgggaactgcggggtagtagcgatctgggttacccagccgttgtggcccttgagggtgccacgaagggtcatctgctcagtcatggcggcggcgagagcgtgtgtcgctgcagcgacgaggatggcactggatggcttagagaaactagcaccacaacctctcctgccgccgccgtcgacgcggccgcgaatt

SEQ ID NO: 938 - DNA, 261 bp, Homo sapiens; identical to SEQ ID NO: 911

SEQ ID NO: 939 - DNA, 228 bp, Homo sapiens
gctcaggctccaaagccagcaggaaagaggtagctcgggacgtggagccgccgcccaggtgcgccaggaccacctcggccgtcaccttagccaggtggctgcttaggtccactgtgcgcttcacgtcctcattgatcagcggcggtgcctcggaggaggcgctgcccggcgccggggcccaagtcccaagcaacaggagcagaaacaagccggcggctggcgcgtcga

SEQ ID NO: 940 - DNA, 97 bp, Homo sapiens
tccttcaagtatgcctgggtgctggacaagctgaaggcggagcgtgagcgcggcatcaccatcgacatctccctctggaagttcgagaccaccaagt

SEQ ID NO: 941 - DNA, 200 bp, Homo sapiens
ggacccaggggcacaggctcccagatgatagcccctctctgaatgagcacccaggcaacacagtccggggctgtgtgtagcaaacctgtcagcagctgcctcctgggacaaccacccccttacatgctatctatctaccagacaaatgaaagctcttcttaccccatctcccaggcaccccccagcaagggctctgaatt

SEQ ID NO: 942 - DNA, 209 bp, Homo sapiens
gaggcggagaggatcatgtccgggaactgcggggtagtagcgatctgggttacccagccgttgtggcccttgagggtgccacgaagggtcatctgctcagtcatggcggcggcgagagcgtgtgtcgctgcagcgacgaggatggcactggatggcttagagaaactagcaccacaacctctcctgccgcgtcgacgcggccgcgaatt

SEQ ID NO: 943 - DNA, 130 bp, Homo sapiens
gtaaggagcccaagaaaaagtgatgccgcctggcagactcgccatcccccaacgacacagggcaggacagcagaggacgtgctgggattaaacacattccccctcaaaaaaaaaaaaaaaaaaaaaaaaa

SEQ ID NO: 944 - DNA, 563 bp, Homo sapiens
gacagtcccagtactctttgctcagctttcggggccggcctcgtttccgcttcccgtgcttgggatcccccttcttgcagtcacgaaaaccatcgctggggaagagcttgccatcagtgggatccaggtccacgtcacttccaccggagtctgaggagtgggagctccgagaagcaccagtccctgcggtggagacgtcagagctgccgggggagggggctcctgcgccacagctgccggggtggtaggggctggcttgctgaccgtcgtccagcagctcctgggcaaaggggctgccctggtcaaagggccctgggtctagggcctcctggaaggccatgccatccttctccagcagctcaatgatccaactgagctcatcagaagagctggaagtgaggtctcgcagctgggcatggagttggtcccccagaggcccaaagaccagacgcagctcctcaagggcacaattgcagagggtggcgccatccatgtcacatcgtgagaagtcaatggcgcttgcgtcgtacttgttcttctccacttggtagctgatccagtcc

SEQ ID NO: 945 - DNA, 637 bp, Homo sapiens
  misc_feature 629: n = A,T,C or G
gctgagccccttactgctcctcccaccaatgggctccctcacacccaggacaggactaagagggagctggcggagaatggaggtgtcctgcagctggtgggcccagaggagaagatgggcctcccgggctcagactcacagaaagagctggcctgaccaccaggcacctcactggcactgctgacccatcccagaaacacaatctcagggacccgagcagctccaaggacgagaggatacagcagacacaacctaatagagagggcgcctgcagccttaacctccacggccttcgatacttatgcaagcctggtgttgctcctgtcctcagagtcatcctgcgctcatgccttttcccgaatgggttcacctctggcagttgccgcttcagtcttggccttagcctcatcttgaagtgggtagctggcgggagagggtggctgcgccccctgctggccctgaggctgcagagttgggagcaggacacctcacctgagtttcattttttttcatgtccaaaccatgcacatactatagtccagaatcaaagcacttttgaaaagtggctgcatggccatcctccagggcccaggaagttgcattccaagggcctgtttacatggcagcanaatccatc

SEQ ID NO: 946 - DNA, 306 bp, Homo sapiens
ggcgcgggctcctctcccctcggctgcccggatgcggagcaagcggctcccggggaagctggcgcgtcggccggctaccgcggcgagcacttaggaaggcgcggggtggccagttcacagctgcccgctccaagtggggggaggcgaattggagaggaggaggaggggaggaaaaagagcaaaagtgggggcgcttgcaccccttctcttctcctcctgcaaagaaaagtttccggggttgaaactggcgagtctccgcgccactgaagtttccagtcagtttcgaggtcgacgcggccgcgaatt

SEQ ID NO: 947 - DNA, 71 bp, Homo sapiens
ggtccagagctcccaggtttccaggttgcagtccctccagtcccagagctcccagggtttcggtttccagt

SEQ ID NO: 948 - DNA, 575 bp, Homo sapiens
  misc_feature 264, 344: n = A,T,C or G
gcggccgccctttttttttttttttgtcagcaaaaatctttttaataagagagtaggatccagggttagtttttgtagcctcggctggcccgtcggcctctggcacgctcgaacttccggcccttggagcggacgtagggtttggtgtggctgtgcggggttcctggggccttgccgaaatgccggtacacctctcggcccttgcgaggaccggagagcaggacagtgccacagcccttaggggagtccagggccagctggtcnaaagtgaggatcttgccccctgccctgaggatgcggctgcgggcccggctggtcacgcgcagtgcacataccttcagttngggtacctcctgaacccgcacatcatcagttatggtccccacaaccacggccgtcttgttttcccggccaggaagcttcatcttccggatcatccgggaaagggacagaggcggccggttggtgcgactcataaacaacctcttcaacacaacctggttgaatgtggagttggttcttctggccagaaacctgtataacttgaccaacagcctcaggtagatatcctggct

SEQ ID NO: 949 - DNA, 294 bp, Homo sapiens
ggggtttccacgtagcccacaatgcccacaaccaccatgggtggtgtctctacaatggtcacagcctccaccacctccttcttgttcaccttggatcccggcctgtcgacttcccgcacgatgtgagtcatgccagccttgtatcccaggaaggctgtgaggtggaccggcttggacgggtcatccttagggaagctcttcaccttcccacgatgcctgctgctgcgcttccgaggcaggaagccgagggacccatgtctgggagcggagaactttctgtgagacatcacgcca

SEQ ID NO: 950 - DNA, 693 bp, Homo sapiens
  misc_feature 556, 676: n = A,T,C or G
ggcccccaattccagctgccacaccacccacggtgactgcattagttcggatgtcatacaaaagctgattgaagcaaccctctactttttggtcgtgagccttttgcttggtgcaggtttcattggctgtgttggtgacgttgtcattgcaacagaatgggggaaaggcactgttctctttgaagtagggtgagtcctcaaaatccgtatagttggtgaagccacagcacttgagccctttcatggtggtgttccacacttgagtgaagtcttcctgggaaccataatctttcttgatggcaggcactaccagcaacgtcaggaagtgctcagccattgtggtgtacaccaaggcgaccacagcagctgcaacctcagcaatgaagatgaggaggaggatgaagaagaacgtcacgagggcacacttgctctcagtcttagcaccatagcagcccaggaaaccaagagcaaagaccacaacgccggctgcgatgaggaagtagcccacgttgacaaactgcatggcactggacgacagtggcccgaagatcttcanaaaggatgccccatcgattgacacccagatgcccactgccaacagggctgcaccacacagaaagatgagcaaattgaagaggatcatcatggtcttaatgaagctgaagcactgcatggnggctcctgttcagggct

SEQ ID NO: 951 - DNA, 607 bp, Homo sapiens
gtggcctgcaaggccgcggacagggcgagcaccgagtcgtacattttgcagctcatcatccccgtgctctgcgtgacgcagtccatccacagccccttgtacatggcctgggccgtgatgatgttgtcacccgcataggagctcatctgccactgcgggatggcggtgcaggccaccagacccacccagcccagcagggccatggagaagcccagcaactgcaggcccgaattggccatttccgccctcagaaaacactgggggcgccgggcgggagaccctacagtaaaacaaacgacacttggggggcagccccacaaaagaaaacttgaggtggagttttccggtcacccaaagagacaaaaagggtttgggccaggtgaatgcaaatcttgtcaccaaactacacacaaatcgacccctccagtgaagcgatggcctcgcggcacagggagtaggatacgccgggagggtggttccagacaaaattggtggtccccgaaggccaggcggttccctccgggcgctctcggcgaccctaggcaaacaaaaggtggaggggccgtctgggcgcgtttctgagcgccggcaagtcccaaagtatcct

SEQ ID NO: 952 - DNA, 372 bp, Homo sapiens
ggatgaggtcaacccgaaggggtttcttgagaagcagtgacttcttctggactttggttctcttctttgtcagccctttttccttggagccagtgtccacgaagaagagtttttcatttggggcctctgacaacaagccaccgctcgtgcgctcctgtagccgcacgtcttccaggaactggtcaacctccagccccagcggctcctgagcaagccgccgccagccccgcttcttatttcttgggcctcgccgccgccgcctcagcgctgggtccaccgaagtgggccgcagccccaggaaaccagaatcggcatcgcttttcgagctgcgcttcccaccaacgccactgcctgtcgacgcggccgcgaatt

SEQ ID NO: 953 - DNA, 275 bp, Homo sapiens
gccatctgctgttttttctcagcaccttccgtcttttgttcaatacttgagacgaccctccaagatgacctacgggctcctacaacatttttataagcaactgagagaagattcctctcctcattggataattcagctccttgctcagttacagacttcatgcaggctgccatgtcatcatatcgctcagcctgctcggccagtttggccttctgaaccagctcatttttatccatgactggatgttctgtgtccggtcgacgcggccgcgaatt

SEQ ID NO: 954 - DNA, 189 bp, Homo sapiens
ggctcccacttccctgcttcgatggagaaggcgaggtggtccagcaggtgccgtaggtccctgacccagctgaccaccaccctgggccagcttctgacagtcccacctcccagttgctggaggggtagtggcctcacagacggccctcctctagatgcagtgggcccagagtcgacgcggccgcgaatt

SEQ ID NO: 955 - DNA, 189 bp, Homo sapiens
gaggcggagaggatcatgtccgggaactgcggggtagtagcgatctgggttacccagccgttgtggcccttgagggtgccacgaagggtcatctgctcagtcatggcggcggcgagagcgtgtgtcgctgcagcgacgaggatggcactggatggcttagagaaactagcgtcgacgcggccgcgaatt

SEQ ID NO: 956 - DNA, 216 bp, Homo sapiens
gcggccgcacgtgtaggcaaagaagcctgtgtccggcctccagaccatgttggcccgcccattcccgctgtaaccgacgacagccttcagacgcagccacccaccgctggcgggaggcgggcaagtgcccttggcagagtgggggctgcagctgaccctggcaggcgtgaaggccttgcaggaagccaggtaggtggtgcgtggggcccccgaatt

SEQ ID NO: 957 - DNA, 62 bp, Homo sapiens
ccagtgggaggctcccaccctggtagatgaacagcccctggagaactacctggatatggagt

SEQ ID NO: 958 - DNA, 199 bp, Homo sapiens
ggattcggtcatattggaattgctgttcctgatgtatacagtgcttgtaaaaggtttgaagaactgggagtcaaatttgtgaagaaacctgatgatggtaaaatgaaaggcctggcatttattcaagatcctgatggctactggattgaaattttgaatcctaacaaaatggcaaccttaatgtagtgctgtgagaatt

SEQ ID NO: 959 - DNA, 212 bp, Homo sapiens
gaggcggagaggatcatgtccgggaactgcggggtagtagcgatctgggttacccagccgttgtggcccttgagggtgccacgaagggtcatctgctcagtcatggcggcggcgagagcgtgtgtcgctgcagcgacgaggatggcactggatggcttagagaaactagcaccacaacctctcctgccgccgcgtcgacgcggccgcgaatt

SEQ ID NO: 960 - DNA, 177 bp, Homo sapiens
  misc_feature 79: n = A,T,C or G
gacattttatgacctctcccaataggggcagaggtgagcacccctggtgaaaagttaagactcagtgagtataaatacnccaagaagagctgtggcttctttcactggtgtcctcagaaaggctgtgagcagtgttggtggcatacctgtcacagcatctagcaaagcacctgaatt

SEQ ID NO: 961 - DNA, 490 bp, Homo sapiens
  misc_feature 203, 296: n = A,T,C or G
gggcgtcctggtgcttaccacctggaaactggtgaggtggtgggagaactcctggtggaccctagtggaagccttccagtaatttcttgaagctgagcgctcaggtgagtagggcgacatctggtggccggttgttgaaggtcattgcagagaggaaggaagccgaggaggggagcctgcagtgagggcgtcctggggttctncggttctcaccacccttgggccacgccgtctagtccacacctgaggagttggtcaggtagaaggggcggatgaccgtgcggaagccgttgaantgccctgccgggcaggggaaggaggaggtgctcttcgagctgttggtgtccagggcactgggaatcgcagccttccagccctcgaaatcggtgacgtctgccacgaagagcccttcgcagagcatcagggctttgttttcgtaggcaatggtgcgatctgagccgccagacttggtgaggcccaggacagggag

SEQ ID NO: 962 - DNA, 159 bp, Homo sapiens
  misc_feature 53, 80, 82, 90: n = A,T,C or G
gggtcggcccgggtggttgcggccacagcgcagcggcggagagcggcgcccancatgacggcgatggcggcgcgcgggcngnggacaganagaagccggtgtaagctcgcgggttgctccggagcgggcgggggccggacgtcgacgcggccgcgaatt

SEQ ID NO: 963 - DNA, 217 bp, Homo sapiens
  misc_feature 79, 80: n = A,T,C or G
gggtagagaaccctgcggctgcgctttcggtgcccgcgagaggcgctggggcgcccggcaggggccgctgcgggctccnngagagggtcgaaggtgaagatctcaggaccggagccccgccggggtcccgggatggtggagggggccggggtcggggcctgcaggatggtcatggtcgggtggcagctgcgagagtgacacatggtgagccgagcgt

SEQ ID NO: 964 - DNA, 540 bp, Homo sapiens
  misc_feature 484: n = A,T,C or G
gtggcctgcaaggccgcggacagggcgagcaccgagtcgtacattttgcagctcatcatccccgtgctctgcgtgacgcagtccatccacagccccttgtacatggcctgggccgtgatgatgttgtcacccgcataggagctcatctgccactgcgggatggcggtgcaggccaccagacccacccagcccagcagggccatggagaagcccagcaactgcaggcccgaattggccatttccgccctcagaaaacactgggggcgccgggcgggagaccctacagtaaaacaaacgacacttggggggcagccccacaaaagaaaacttgaggtggagttttccggtcacccaaagagacaaaaagggtttgggccaggtgaatgcaaatcttgtcaccaaactacacacaaatcgacccctccagtgaagcgatggcctcgcggcacagggagtaggatacgccgggagggtggttccaganaaaattggtggtccccgaaggccaggcggttccctccgggcgctctcggcgaccct

SEQ ID NO: 965 - DNA, 321 bp, Homo sapiens
  misc_feature 299, 307: n = A,T,C or G
gcccacagtggcttgtttccgcagtgcgcggccgtcagcacccaactctggtccaccaggacacccgcgcagtggaacgagaggccgttgaagagcgagacctgccagggctgcgagccgcgcgcgcacggggcgccataggcttcggggtccaagcgcgtgtcgttttgggggagcagcgccgcctctgcggcccagagttgcgccatcagcagcggcagcagcttcgccagagcccgggcgccagaggcggcggagaggtggaggtgcggagctctcatggccaggatctgggagtngccgatangaaggagggagggg

SEQ ID NO: 966 - DNA, 642 bp, Homo sapiens
  misc_feature 238: n = A,T,C or G
ggtggacaccaccctcaagagcctgagccagcagatcgagaacatccggagcccagagggcagccgcaagaaccccgcccgcacctgccgtgacctcaagatgtgccactctgactggaagagtggagagtactggattgaccccaaccaaggctgcaacctggatgccatcaaagtcttctgcaacatggagactggtgagacctgcgtgtaccccactcagcccagtgtggcccanaagaactggtacatcagcaagaaccccaaggacaagaggcatgtctggttcggcgagagcatgaccgatggattccagttcgagtatggcggccagggctccgaccctgccgatgtggccatccagctgaccttcctgcgcctgatgtccaccgaggcctcccagaacatcacctaccactgcaagaacagcgtggcctacatggaccagcagactggcaacctcaagaaggccctgctcctccagggctccaacgagatcgagatccgcgccgagggcaacagccgcttcacctacagcgtcactgtcgatggctgcacgagtcacaccggagcctggggcaagacagtgattgaatacaaaaccaccaagacctcccgcctgcccatcatcgatgtggcccc

SEQ ID NO: 967 - DNA, 650 bp, Homo sapiens
  misc_feature 571: n = A,T,C or G
ggtggacaccaccctcaagagcctgagccagcagatcgagaacatccggagcccagagggcagccgcaagaaccccgcccgcacctgccgtgacctcaagatgtgccactctgactggaagagtggagagtactggattgaccccaaccaaggctgcaacctggatgccatcaaagtcttctgcaacatggagactggtgagacctgcgtgtaccccactcagcccagtgtggcccagaagaactggtacatcagcaagaaccccaaggacaagaggcatgtctggttcggcgagagcatgaccgatggattccagttcgagtatggcggccagggctccgaccctgccgatgtggccatccagctgaccttcctgcgcctgatgtccaccgaggcctcccagaacatcacctaccactgcaagaacagcgtggcctacatggaccagcagactggcaacctcaagaaggccctgctcctccagggctccaacgagatcgagatccgcgccgagggcaacagccgcttcacctacagcgtcactgtcgatggctgcacgagtcacaccggnagcctggggcaagacagtgattgaatacaaaaccaccaagaccttccgcctgcccatcatcgatgtggcccccttggac

SEQ ID NO: 968 - DNA, 629 bp, Homo sapiens
  misc_feature 571: n = A,T,C or G
ggtggacaccaccctcaagagcctgagccagcagatcgagaacatccggagcccagagggcagccgcaagaaccccgcccgcacctgccgtgacctcaagatgtgccactctgactggaagagtggagagtactggattgaccccaaccaaggctgcaacctggatgccatcaaagtcttctgcaacatggagactggtgagacctgcgtgtaccccactcagcccagtgtggcccagaagaactggtacatcagcaagaaccccaaggacaagaggcatgtctggttcggcgagagcatgaccgatggattccagttcgagtatggcggccagggctccgaccctgccgatgtggccatccagctgaccttcctgcgcctgatgtccaccgaggcctcccagaacatcacctaccactgcaagaacagcgtggcctacatggaccagcagactggcaacctcaagaaggccctgctcctccagggctccaacgagatcgagatccgcgccgagggcaacagccgcttcacctacagcgtcactgtcgatggctgcacgagtcacaccggnagcctggggcaagacagtgattgaatacaaaaccaccaagacctcccgcctgcccatc

SEQ ID NO: 969 - DNA, 222 bp, Homo sapiens
gaatgtcaggggtgttgggggctttggctgggtcctgggtcttcgtgtagagacctggaggcgcttggttcttggggttctccaggattccagcctcgtagctgatgtgcatgaggttctcatccatgctccacgggttcttgggagtgaccgggatgggaatcccgtgttgctttgcgtactccatcaggtcattgcggcccttgaaccggttgtagaatt

SEQ ID NO: 970 - DNA, 79 bp, Homo sapiens
gcaggggccgcctggccttgctccgctccacgaggaggccgccaaccgcagggccgcgacacggacgggaagcaacgga

SEQ ID NO: 971 - DNA, 111 bp, Homo sapiens
ggaaaatgcatctaccccacccaaccagcagcctcactttaggctgccttgtcccgggcgccccattcgtcagccccacgcctcctccaggatccgggcccagctcgaatt

SEQ ID NO: 972 - DNA, 609 bp, Homo sapiens
  misc_feature 571: n = A,T,C or G
ggtggacaccaccctcaagagcctgagccagcagatcgagaacatccggagcccagagggcagccgcaagaaccccgcccgcacctgccgtgacctcaagatgtgccactctgactggaagagtggagagtactggattgaccccaaccaaggctgcaacctggatgccatcaaagtcttctgcaacatggagactggtgagacctgcgtgtaccccactcagcccagtgtggcccagaagaactggtacatcagcaagaaccccaaggacaagaggcatgtctggttcggcgagagcatgaccgatggattccagttcgagtatggcggccagggctccgaccctgccgatgtggccatccagctgaccttcctgcgcctgatgtccaccgaggcctcccagaacatcacctaccactgcaagaacagcgtggcctacatggaccagcagactggcaacctcaagaaggccctgctcctccagggctccaacgagatcgagatccgcgccgagggcaacagccgcttcacctacagcgtcactgtcgatggctgcacgagtcacaccggnagcctggggcaagacagtgattgaatacaaaaccacca

SEQ ID NO: 973 - DNA, 311 bp, Homo sapiens
ggggtttccacgtagcccacaatgcccacaaccaccatgggtggtgtctctacaatggtcacagcctccaccacctccttcttgttcaccttggatcccggcctgtcgacttcccgcacgatgtgagtcatgccagccttgtatcccaggaaggctgtgaggtggaccggcttggacgggtcatccttagggaagctcttcaccttcccacgatgcctgctgctgcgcttccgaggcaggaagccgagggacccatgtctgggagcggagaactttctgtgagacatcacgcgtcgacgcggccgcgaatt

SEQ ID NO: 974 - DNA, 180 bp, Homo sapiens
  misc_feature 114, 127, 133, 138, 162: n = A,T,C or G
gaggcggagaggatcatgtccgggaactgcggggtagtagcgatctgggttacccagccgttgtggcccttgagggtgccacgaagggtcatctgctcagtcatggcggcggcnagagcgtgtgtcnctgcancgacnaggatggcactggatggcttaganaaactagcaccacgtcga

SEQ ID NO: 975 - DNA, 187 bp, Homo sapiens
gcaccagccccggggactatgtgctcagcgtctcagagaactcgcgcgtctcccactacatcatcaacagcagcggcccgcgcccgccggtgccaccgtcgcccgcccagcctccgcccggggtgagcccctccagactccgaataggagatcaagagtttgattcattgcctgctttactggaatt

SEQ ID NO: 976 - DNA, 59 bp, Homo sapiens
ctggttccgctgcatggacctggacggggacggcgccctgtccatgttcgagctcgagt

SEQ ID NO: 977 - DNA, 66 bp, Homo sapiens
ggtccagagctcccaggtttccaggttgcagtccctccagtcccagagctcccagggtttcggttt

SEQ ID NO: 978 - DNA, 114 bp, Homo sapiens
ggagctgatgcgggaaccgggcccactcgtgtaggagcggctgctgaaggcccgggggccagaggtggacaccttgtaggacttctgggtcacccgtcgacgcggccgcgaatt

SEQ ID NO: 979 - DNA, 177 bp, Homo sapiens; identical to SEQ ID NO: 922

SEQ ID NO: 980 - DNA, 188 bp, Homo sapiens
  misc_feature 41: n = A,T,C or G
ggagctgatgcgggaaccgggcccactcgtgtaggagcggntgctgaaggcccgggggccagaggtggacaccttgtaggacttctgggtcaccctgatggacatggtagaggctggagtggaggcaggcgggccgaaccaggcggagatcctagaaggagcggagaaggtcgacgcggccgcgaatt

SEQ ID NO: 981 - DNA, 184 bp, Homo sapiens
  misc_feature 91: n = A,T,C or G
gggccccaggaggccgggtgggcacaggccatggcgagggtggggcacaagagccccagaccccggcggctttgcactgatgggctgcggntgggcacaggccatagtgaggggggcatgagagccccagaccgggcggctttgcactgatgagctgcagggcaggtcgacgcggccgcgaatt

SEQ ID NO: 982 - DNA, 98 bp, Homo sapiens
tccactagtccagtgtggtggaattcgcggccgcgtcgaccgaaccctgaaccctacggtcccgacccgcgggcgaggccgggtacctgggctgggat

SEQ ID NO: 983 - DNA, 425 bp, Homo sapiens
  misc_feature 165: n = A,T,C or G
gccggatatggtcctgccggtggcagcctatgggctgatcctgatggccatgctgtggcgcggcctggcccagggcgggagtgccggctggggcgcgctgctcttcacgctctctgatggcgtgctggcctgggacaccttcgcccagcccctgccccatgcccncctggtgatcatgaccacctactatgctgcccagctcctcatcacactgtcagccctcaggagcccggtgcccaagactgactgactagggagcttgaagggccggtgttcaggccctctcctcctgcaaggacctgggcctcccagcccagcccagcctgagaaataccctcagcagcgaagcttcctgacgcctgtctgcaggcgccgctgccgccgtcgcttctggctgaagacgtttgaggacgatttgcggaatt

SEQ ID NO: 984 - DNA, 148 bp, Homo sapiens
  misc_feature 5: n = A,T,C or G
tcctnagccagggagacagggaccaggcagcacaggcctgccagcaggaggatgccccacgagacagaagacggcattgtcgattcactgtcccaggtcagtggtgggtcgacgcggccgcgaattccaccacactggactagtggat

SEQ ID NO: 985 - DNA, 461 bp, Homo sapiens
  misc_feature 238, 255, 403, 448, 451: n = A,T,C or G
ggtggacaccaccctcaagagcctgagccagcagatcgagaacatccggagcccagagggcagccgcaagaaccccgcccgcacctgccgtgacctcaagatgtgccactctgactggaagagtggagagtactggattgaccccaaccaaggctgcaacctggatgccatcaaagtcttctgcaacatggagactggtgagacctgcgtgtaccccactcagcccagtgtggcccanaagaactggtacatcancaagaaccccaaggacaagaggcatgtctggttcggcgagagcatgaccgatggattccagttcgagtatggcggccagggctccgaccctgccgatgtggccatccagctgaccttcctgcgcctgatgtccaccgaggcctcccanaacatcacctaccactgcaagaacagcgtggcctacatggaccancanactggcaacc

SEQ ID NO: 986 - DNA, 138 bp, Homo sapiens
  misc_feature 45, 137: n = A,T,C or G
gagcggctgctgaaggcccgggggccagaggtggacaccttgtangacttctgggtcaccctgatggacatggtagaggcaggagtggaggcaggcgggccgaaccaggcggagatcctagaaggagcggaggtcgnc

SEQ ID NO: 987 - DNA, 555 bp, Homo sapiens
  misc_feature 423: n = A,T,C or G
gcggccgcccttttttttttttttttttagtggtataactatatttattgtgcctgagaggcaaggtgagggaaaaatctcaacagaagcaagtttggggaaaatctggagtccccagtaaaaagcaggaaggtctctgctgtactcatcacagaatgggagagagggctctcaatagatcattccctttgtttctcccctgggcttcttgagcttctcgaagttcttcaggatgatgtcatataacacagcataagcattgcggatctccatgaccatcagccggatgtcccggtactctgcctcatccagctcgtgcaccagctgccgataatcacccacatggggctgcttggctgctttagtcactgcatcaccacgctcagagaaatacttagagatttgagtgtggaagccttctancttggtgtggaggctggtcatcagctcaaacaccttctcctggacagccactccaaaattgttaccatcctcaatccgaggtatctgcagctgcaaccaggtggtgaccaggttgagctgctcaatgacatc

SEQ ID NO: 988 - DNA, 318 bp, Homo sapiens
gacggcgcgggcgacctacgaacagctttgaggaagccccgacagtggcggcgtccagtgcctccgagggcggcgaccgcggctccgcagcctctcccagccgctccgcccggttccggggagtcggtcgggacaaaatggcctcccctcccccctcagggcttctcggccgggacgctcccacgggcgagcaagcctgctctgccgtcgaggaggcgcagcgggcgtgaggacagtctctctcccgagcggaaactccctgctagcacgcggcgagggcagcgaagaaggacccctaagtcgacgagctcagttaca

SEQ ID NO: 989 - DNA, 177 bp, Homo sapiens; identical to SEQ ID NO: 922

SEQ ID NO: 990 - DNA, 144 bp, Homo sapiens
  misc_feature 11: n = A,T,C or G
gtgagcacccntggtgaaaagttaagactcagtgagtataaatacgccaagaagagctgtggcttctttcactggtgtcctcagaaaggctgtgagcagtgttggtggcatacctgtcacagcatctagcaaagcacctgaatt

SEQ ID NO: 991 - DNA, 659 bp, Homo sapiens
ggtggacaccaccctcaagagcctgagccagcagatcgagaacatccggagcccagagggcagccgcaagaaccccgcccgcacctgccgtgacctcaagatgtgccactctgactggaagagtggagagtactggattgaccccaaccaaggctgcaacctggatgccatcaaagtcttctgcaacatggagactggtgagacctgcgtgtaccccactcagcccagtgtggcccagaagaactggtacatcagcaagaaccccaaggacaagaggcatgtctggttcggcgagagcatgaccgatggattccagttcgagtatggcggccagggctccgaccctgccgatgtggccatccagctgaccttcctgcgcctgatgtccaccgaggcctcccagaacatcacctaccactgcaagaacagcgtggcctacatggaccagcagactggcaacctcaagaaggccctgctcctccagggctccaacgagatcgagatccgcgccgagggcaacagccgcttcacctacagcgtcactgtcgatggctgcacgagtcacaccggagcctggggcaagacagtgattgaatacaaaaccaccaagacctcccgcctgcccatcatcgatgtggcccccttggacgttggtgccc

SEQ ID NO: 992 - DNA, 226 bp, Homo sapiens
tccgctgcactgggtttgccggattcttgggcttcccacatactgcttcacattcaggaagtttatctccaacagccttatttatccactgcttcttatcatttaaggtgtatactccatctccttctgtgcgcagtttgtagtagttcttacactggtagcgaaccgagtgctccacatagccatgtgcaatctcggggggcttcgggcagccgtcatctgcgat

SEQ ID NO: 993 - DNA, 160 bp, Homo sapiens
  misc_feature 8, 9, 15, 37, 41, 85, 87: n = A,T,C or G
ctcgtgtnngagcgnctgctgaaggcccgggggccanaggnggacaccttgtacgacttctgggtcaccctgatggacatggtanangctggagtggaggcaggcgggccgaaccaggcggagatcctagaaggagcggaggtcgacgcggccgcgaatt

SEQ ID NO: 994 - DNA, 622 bp, Homo sapiens
  misc_feature 1, 9: n = A,T,C or G
nagcctganccagcagatcgagaacatccggagcccagagggcagccgcaagaaccccgcccgcacctgccgtgacctcaagatgtgccactctgactggaagagtggagagtactggattgaccccaaccaaggctgcaacctggatgccatcaaagtcttctgcaacatggagactggtgagacctgcgtgtaccccactcagcccagtgtggcccagaagaactggtacatcagcaagaaccccaaggacaagaggcatgtctggttcggcgagagcatgaccgatggattccagttcgagtatggcggccagggctccgaccctgccgatgtggccatccagctgaccttcctgcgcctgatgtccaccgaggcctcccagaacatcacctaccactgcaagaacagcgtggcctacatggaccagcagactggcaacctcaagaaggccctgctcctccagggctccaacgagatcgagatccgcgccgagggcaacagccgcttcacctacagcgtcactgtcgatggctgcacgagtcacaccggagcctggggcaagacagtgattgaatacaaaaccaccaagacctcccgcctgcccatcatcgatgtggcc

SEQ ID NO: 995 - DNA, 158 bp, Homo sapiens
aataagattttgccagaggggaaggctcgattgtgctgttaataacttaataatgacaaaataatgaggtgtatatgctttacatgcaatgttatatagtgaattgttctgattcttaattgtaagtctggtttttttatctgtaagataattgtgtg

SEQ ID NO: 996 - DNA, 295 bp, Homo sapiens
cggccgcgtcgactctcggagcggagacggcaaatggcggacttcgacacctacgacgatcgggcctacagcagcttcggcggcggcagagggtcccgcggcagtgctggtggccatggttcccgtagccagaaggagttgcccacagagcccccctacacagcatacgtaggaaatctacctttcaatacggttcagggcgacatagatgctatctttaaggatctcagcataaggagtgtacggctagtcagagacaaagacacagataaatttaaaggattctgctatgtag

SEQ ID NO: 997 - DNA, 125 bp, Homo sapiens
cggccgccctttttttttttttttttaaggttttttggctgtaagtttattcaatgcaaaagaatcctctccaattttactgaggtggctgaccacgtccacgaccaaatccgcctctaaactgg

SEQ ID NO: 998 - DNA, 152 bp, Homo sapiens
gagctgatgcgggaaccgggcccactcgtgtaggagcggctgctgaaggcccgggggccagaggtggacaccttgtaggacttctgggtcaccctgatggacatggtagaggctggagtggaggcaggcgggccgaaccaggcggagatcct

SEQ ID NO: 999 - DNA, 119 bp, Homo sapiens
  misc_feature 23, 29, 54, 76, 77: n = A,T,C or G
taaagcaaccactaaaccacctncagcangagaaagcagcagagagctcttcanacagctcagactctgacagctnngaggatgatgaagctccttctaagccagctggtaccaccaag

SEQ ID NO: 1000 - DNA, 209 bp, Homo sapiens
  misc_feature 6, 7: n = A,T,C or G
ccctcnngaggcggagaggatcatgtccgggaactgcggggtagtagcgatctgggttacccagccgttgtggcccttgagggtgccacgaagggtcatctgctcagtcatggcggcggcgagagcgtgtgtcgctgcagcgacgaggatggcactggatggcttagagaaactagcaccacaacctctcctgcgtcgacgcggccgcg

SEQ ID NO: 1001 - DNA, 390 bp, Homo sapiens
gtggacaccaccctcaagagcctgagccagcagatcgagaacatccggagcccagagggcagccgcaagaaccccgcccgcacctgccgtgacctcaagatgtgccactctgactggaagagtggagagtactggattgaccccaaccaaggctgcaacctggatgccatcaaagtcttctgcaacatggagactggtgagacctgcgtgtaccccactcagcccagtgtggcccagaagaactggtacatcagcaagaaccccaaggacaagaggcatgtctggttcggcgagagcatgaccgatggattccagttcgagtatggcggccagggctccgaccctgccgatgtggccatccagctgaccttcctgcgcctgatgtccacc

SEQ ID NO: 1002 - DNA, 613 bp, Homo sapiens
gtggacaccaccctcaagagcctgagccagcagatcgagaacatccggagcccagagggcagccgcaagaaccccgcccgcacctgccgtgacctcaagatgtgccactctgactggaagagtggagagtactggattgaccccaaccaaggctgcaacctggatgccatcaaagtcttctgcaacatggagactggtgagacctgcgtgtaccccactcagcccagtgtggcccagaagaactggtacatcagcaagaaccccaaggacaagaggcatgtctggttcggcgagagcatgaccgatggattccagttcgagtatggcggccagggctccgaccctgccgatgtggccatccagctgaccttcctgcgcctgatgtccaccgaggcctcccagaacatcacctaccactgcaagaacagcgtggcctacatggaccagcagactggcaacctcaagaaggccctgctcctccagggctccaacgagatcgagatccgcgccgagggcaacagccgcttcacctacagcgtcactgtcgatggctgcacgagtcacaccggagcctggggcaagacagtgattgaatacaaaaccaccaagacct

SEQ ID NO: 1003 - DNA, 639 bp, Homo sapiens
gtggacaccaccctcaagagcctgagccagcagatcgagaacatccggagcccagagggcagccgcaagaaccccgcccgcacctgccgtgacctcaagatgtgccactctgactggaagagtggagagtactggattgaccccaaccaaggctgcaacctggatgccatcaaagtcttctgcaacatggagactggtgagacctgcgtgtaccccactcagcccagtgtggcccagaagaactggtacatcagcaagaaccccaaggacaagaggcatgtctggttcggcgagagcatgaccgatggattccagttcgagtatggcggccagggctccgaccctgccgatgtggccatccagctgaccttcctgcgcctgatgtccaccgaggcctcccagaacatcacctaccactgcaagaacagcgtggcctacatggaccagcagactggcaacctcaagaaggccctgctcctccagggctccaacgagatcgagatccgcgccgagggcaacagccgcttcacctacagcgtcactgtcgatggctgcacgagtcacaccggagcctggggcaagacagtgattgaatacaaaaccaccaagacctcccgcctgcccatcatcgatgtggcc

SEQ ID NO: 1004 - DNA, 85 bp, Homo sapiens
ccgttattcgtcgtggctcaagcccggccacgccgccccaagggctcctcccgacctcccggcctgccgctccggccactgcggg

SEQ ID NO: 1005 - DNA, 636 bp, Homo sapiens
gtggacaccaccctcaagagcctgagccagcagatcgagaacatccggagcccagagggcagccgcaagaaccccgcccgcacctgccgtgacctcaagatgtgccactctgactggaagagtggagagtactggattgaccccaaccaaggctgcaacctggatgccatcaaagtcttctgcaacatggagactggtgagacctgcgtgtaccccactcagcccagtgtggcccagaagaactggtacatcagcaagaaccccaaggacaagaggcatgtctggttcggcgagagcatgaccgatggattccagttcgagtatggcggccagggctccgaccctgccgatgtggccatccagctgaccttcctgcgcctgatgtccaccgaggcctcccagaacatcacctaccactgcaagaacagcgtggcctacatggaccagcagactggcaacctcaagaaggccctgctcctccagggctccaacgagatcgagatccgcgccgagggcaacagccgcttcacctacagcgtcactgtcgatggctgcacgagtcacaccggagcctggggcaagacagtgattgaatacaaaaccaccaagacctcccgcctgcccatcatcgatgtg

SEQ ID NO: 1006 - DNA, 629 bp, Homo sapiens
  misc_feature 468: n = A,T,C or G
gtggacaccaccctcaagagcctgagccagcagatcgagaacatccggagcccagagggcagccgcaagaaccccgcccgcacctgccgtgacctcaagatgtgccactctgactggaagagtggagagtactggattgaccccaaccaaggctgcaacctggatgccatcaaagtcttctgcaacatggagactggtgagacctgcgtgtaccccactcagcccagtgtggcccagaagaactggtacatcagcaagaaccccaaggacaagaggcatgtctggttcggcgagagcatgaccgatggattccagttcgagtatggcggccagggctccgaccctgccgatgtggccatccagctgaccttcctgcgcctgatgtccaccgaggcctcccagaacatcacctaccactgcaagaacagcgtggcctacatggaccagcagactggcaacctcaagaangccctgctcctccagggctccaacgagatcgagatccgcgccgagggcaacagccgcttcacctacagcgtcactgtcgatggctgcacgagtcacaccggagcctggggcaagacagtgattgaatacaaaaccaccaagacctcccgcctgcccatcat

SEQ ID NO: 1007 - DNA, 575 bp, Homo sapiens
  misc_feature 248, 372: n = A,T,C or G
gtggacaccaccctcaagagcctgagccagcagatcgagaacatccggagcccagagggcagccgcaagaaccccgcccgcacctgccgtgacctcaagatgtgccactctgactggaagagtggagagtactggattgaccccaaccaaggctgcaacctggatgccatcaaagtcttctgcaacatggagactggtgagacctgcgtgtaccccactcagcccagtgtggcccagaagaactggtncatcagcaagaaccccaaggacaagaggcatgtctggttcggcgagagcatgaccgatggattccagttcgagtatggcggccagggctccgaccctgccgatgtggccatccagctgaccttnctgcgcctgatgtccaccgaggcctcccagaacatcacctaccactgcaagaacagcgtggcctacatggaccagcagactggcaacctcaagaaggccctgctcctccagggctccaacgagatcgagatccgcgccgagggcaacagccgcttcacctacagcgtcactgtcgatggctgcacgagtcacaccggagcctg

SEQ ID NO: 1008 - DNA, 62 bp, Homo sapiens; identical to SEQ ID NO: 843

SEQ ID NO: 1009 - DNA, 180 bp, Homo sapiens
  misc_feature 154: n = A,T,C or G
gagctgatgcgggaaccgggcccactcgtgtaggagcggctgctgaaggcccgggggccagaggtggacaccttgtaggacttctgggtcaccctgatggacatggtagaggcaggagtggaggcaggcgggccgaaccaggcggagatcctanaaggagcggaggtcgacgcggccgcg

SEQ ID NO: 1010 - DNA, 169 bp, Homo sapiens
gaggcggcacaggtcacgcatggccagcacggcagccatggcgctgcgctcgctcatgtttctcgccaggtaggtctgggccaggttcttgagtttgaagctgctggccccgggcacacgctcccggatgagaggcagggcagccaggaagcccgagatggcctcctgg

SEQ ID NO: 1011 - DNA, 170 bp, Homo sapiens
  misc_feature 78, 79: n = A,T,C or G
gagctgatgcgggaaccgggcccactcgtgtaggagcggctgctgaaggcccgggggccagaggtggacaccttgtannacttctgggtcaccctgatggacatggtagaggctggagtggaggcaggcgggccgaaccaggcggagatcctagaaggagcggaggtcga

SEQ ID NO: 1012 - DNA, 344 bp, Homo sapiens
  misc_feature 231, 235, 238, 245, 246, 251, 255, 263, 264, 270, 276, 302,313, 316, 317, 325: n = A,T,C or G
gtggacaccaccctcaagagcctgagccagcagatcgagaacatccggagcccagagggcagccgcaagaaccccgcccgcacctgccgtgacctcaagatgtgccactctgactggaagagtggagagtactggattgaccccaaccaaggctgcaacctggatgccatcaaagtcttctgcaacatggagactggtgagacctgcgtgtaccccactcagcccagtggnccanaanaactggnncatcngcangaaccccnnggacangaggcntgtctggttcggcgagagcatgaccnatggattccanttnnagtatggnggccagggctccgaccctg

SEQ ID NO: 1013 - DNA, 157 bp, Homo sapiens
  misc_feature 21, 22, 127, 136, 137: n = A,T,C or G
atagaaccccgcccgcacctnncgtgacctcaagatgtgccactctgactggaagagtggagagtactggattgaccccaaccaaggctgcaacctggatgccatcaaagtcttctgcaacatgganactggtganncctgcgtgtaccccactcag

SEQ ID NO: 1014 - DNA, 621 bp, Homo sapiens
gtggacaccaccctcaagagcctgagccagcagatcgagaacatccggagcccagagggcagccgcaagaaccccgcccgcacctgccgtgacctcaagatgtgccactctgactggaagagtggagagtactggattgaccccaaccaaggctgcaacctggatgccatcaaagtcttctgcaacatggagactggtgagacctgcgtgtaccccactcagcccagtgtggcccagaagaactggtacatcagcaagaaccccaaggacaagaggcatgtctggttcggcgagagcatgaccgatggattccagttcgagtatggcggccagggctccgaccctgccgatgtggccatccagctgaccttcctgcgcctgatgtccaccgaggcctcccagaacatcacctaccactgcaagaacagcgtggcctacatggaccagcagactggcaacctcaagaaggccctgctcctccagggctccaacgagatcgagatccgcgccgagggcaacagccgcttcacctacagcgtcactgtcgatggctgcacgagtcacaccggagcctggggcaagacagtgattgaatacaaaaccaccaagacctcccgcctg

SEQ ID NO: 1015 - DNA, 104 bp, Homo sapiens
  misc_feature 91, 95: n = A,T,C or G
gtggacaccaccctcaagagcctgagccagcagatcgagaacatccggagcccagagggcagccgcaagaaccccgcccgcacctgccgtnctcnagatgtgcc

SEQ ID NO: 1016 - DNA, 101 bp, Homo sapiens
gctgaccaggcggaaagaggagctgcccatgaaggggggcaccctgggcgggatccctggggagcccgccgtggaccaccgagatgtggatgagctgctgg

SEQ ID NO: 1017 - DNA, 172 bp, Homo sapiens; identical to SEQ ID NO: 858

SEQ ID NO: 1018 - DNA, 637 bp, Homo sapiens
gtggacaccaccctcaagagcctgagccagcagatcgagaacatccggagcccagagggcagccgcaagaaccccgcccgcacctgccgtgacctcaagatgtgccactctgactggaagagtggagagtactggattgaccccaaccaaggctgcaacctggatgccatcaaagtcttctgcaacatggagactggtgagacctgcgtgtaccccactcagcccagtgtggcccagaagaactggtacatcagcaagaaccccaaggacaagaggcatgtctggttcggcgagagcatgaccgatggattccagttcgagtatggcggccagggctccgaccctgccgatgtggccatccagctgaccttcctgcgcctgatgtccaccgaggcctcccagaacatcacctaccactgcaagaacagcgtggcctacatggaccagcagactggcaacctcaagaaggccctgctcctccagggctccaacgagatcgagatccgcgccgagggcaacagccgcttcacctacagcgtcactgtcgatggctgcacgagtcacaccggagcctggggcaagacagtgattgaatacaaaaccaccaagacctcccgcctgcccatcatcgatgtgg

SEQ ID NO: 1019 - DNA, 623 bp, Homo sapiens
gtggacaccaccctcaagagcctgagccagcagatcgagaacatccggagcccagagggcagccgcaagaaccccgcccgcacctgccgtgacctcaagatgtgccactctgactggaagagtggagagtactggattgaccccaaccaaggctgcaacctggatgccatcaaagtcttctgcaacatggagactggtgagacctgcgtgtaccccactcagcccagtgtggcccagaagaactggtacatcagcaagaaccccaaggacaagaggcatgtctggttcggcgagagcatgaccgatggattccagttcgagtatggcggccagggctccgaccctgccgatgtggccatccagctgaccttcctgcgcctgatgtccaccgaggcctcccagaacatcacctaccactgcaagaacagcgtggcctacatggaccagcagactggcaacctcaagaaggccctgctcctccagggctccaacgagatcgagatccgcgccgagggcaacagccgcttcacctacagcgtcactgtcgatggctgcacgagtcacaccggagcctggggcaagacagtgattgaatacaaaaccaccaagacctcccgcctgcc

SEQ ID NO: 1020 - DNA, 233 bp, Homo sapiens
ggtagagaaccctgcggctgcgctttcggtgcccgcgagaggcgctggggcgcccggcaggggccgctgcgggctccgggagagggtcgaaggtgaagatctcaggaccggagccccgccggggtcccgggatggtggagggggccggggtcggggcctgcaggatggtcatggtcgggtggcagctgcgagagtgacacatggtgagccgagcggaggtcgacgcggccgcg

SEQ ID NO: 1021 - DNA, 180 bp, Homo sapiens
gagctgatgcgggaaccgggcccactcgtgtaggagcggctgctgaaggcccgggggccagaggtggacaccttgtaggacttctgggtcaccctgatggacatggtagaggcaggagtggaggcaggcgggccgaaccaggcggagatcctagaaggagcggaggtcgacgcggccgcg

SEQ ID NO: 1022 - DNA, 636 bp, Homo sapiens; identical to SEQ ID NO: 1005

SEQ ID NO: 1023 - DNA, 162 bp, Homo sapiens
aggcggagaggatcatgtccgggaactgcggggtagtagcgatctgggttacccagccgttgtggcccttgagggtgccacgaagggtcatctgctcagtcatggcggcggcgagagcgtgtgtcgctgcagcgacgaggatggcacgtcgacgcggccgcg

SEQ ID NO: 1024 - DNA, 124 bp, Homo sapiens
tccactagtccagtgtggtggaattcgcggccgcgtcgacgccgagcaggaggcgccatcatgggagtggacatccgccataacaaggaccgaaaggttcggcgcaaggagcccaagagccagg

SEQ ID NO: 1025 - DNA, 635 bp, Homo sapiens
  misc_feature 618: n = A,T,C or G
gcccccaattccagctgccacaccacccacggtgactgcattagttcggatgtcatacaaaagctgattgaagcaaccctctactttttggtcgtgagccttttgcttggtgcaggtttcattggctgtgttggtgacgttgtcattgcaacagaatgggggaaaggcactgttctctttgaagtagggtgagtcctcaaaatccgtatagttggtgaagccacagcacttgagccctttcatggtggtgttccacacttgagtgaagtcttcctgggaaccataatctttcttgatggcaggcactaccagcaacgtcaggaagtgctcagccattgtggtgtacaccaaggcgaccacagcagctgcaacctcagcaatgaagatgaggaggaggatgaagaagaacgtcacgagggcacacttgctctcagtcttagcaccatagcagcccaggaaaccaagagcaaagaccacaacgccggctgcgatgaggaagtagcccacgttgacaaactgcatggcactggacgacagtggcccgaagatcttcagaaaggatgccccatcgattgacacccagatgcccactgccaacagggctgcaccacacagaangatgagcaaattgaaga

SEQ ID NO: 1026 - DNA, 355 bp, Homo sapiens
ccatctgctgttttttctcagcaccttccgtcttttgttcaatacttgagacgaccctccaagatgacctacgggctcctacaacatttttataagcaactgagagaagattcctctcctcattggataattcagctccttgctcagttacagacttcatgcaggctgccatgtcatcatatcgctcagcctgctcggccagtttggccttctgaaccagctcatttttatccatgactggatgttctgtgtccggagtgggtggtggcggcggacggacgggctcagcagtctctgggcggcggcggcggcagcagcggcgaggctgagactctgtcccgtcgacgcggccgcg

SEQ ID NO: 1027 - DNA, 148 bp, Homo sapiens
tgccaccctggtgcccatgactgtggccttggtgcccaggaggggccagagctggtgggtgctggctgttcttctccctctggccctgagcccctggctctggagctgcctgtaggggctgaagggccatcccactgccattctccgg

SEQ ID NO: 1028 - DNA, 479 bp, Homo sapiens
  misc_feature 439: n = A,T,C or G
ggcgtcctggtgcttaccacctggaaactggtgaggtggtgggagaactcctggtggaccctagtggaagccttccagtaatttcttgaagctgagcgctcaggtgagtagggcgacatctggtggccggttgttgaaggtcattgcagagaggaaggaagccgaggaggggagcctgcagtgagggcgtcctggggttctccggttctcaccacccttgggccacgccgtctagtccacacctgaggagttggtcaggtagaaggggcggatgaccgtgcggaagccgttgaagtgccctgccgggcaggggaaggaggaggtgctcttcgagctgttggtgtccagggcactgggaatcgcagccttccagccctcgaaatcggtgacgtctgccacgaagagcccttcgcagagcatcagggctttgttttcgtangcaatggtgcgatctgagccgccagacttggtgaggccca

SEQ ID NO: 1029 - DNA, 64 bp, Homo sapiens
  misc_feature 5, 6: n = A,T,C or G
gcgtnnatgtagttcttgagcacctcgggaatgggcccctcggtcacggctggcaccgcctggg

SEQ ID NO: 1030 - DNA, 531 bp, Homo sapiens
cctgtcagagtggcactggtagaagttccaggaaccctgaactgtaagggttcttcatcagtgccaacaggatgacatgaaatgatgtactcagaagtgtcctggaatggggcccatgagatggttgtctgagagagagcttcttgtcctacattcggcgggtatggtcttggcctatgccttatgggggtggccgttgtgggcggtgtggtccgcctaaaaccatgttcctcaaagatcatttgttgcccaacactgggttgctgaccagaagtgccaggaagctgaataccatttccagtgtcatacccagggtgggtgacgaaaggggtcttttgaactgtggaaggaacatccaagatctctggtccatgaagattggggtgtggaagggttaccagttggggaagctcgtctgtctttttccttccaatcaggggctcgctcttctgattattcttcagggcaatgacataaattgtatattcggttcccggttccaggccagtaatagtagcctctgtgacacca

SEQ ID NO: 1031 - DNA, 518 bp, Homo sapiens
  misc_feature 443: n = A,T,C or G
cctgggtggtggagcgaatgggccgattccaccggatcctggagcctggtttgaacatcctcatccctgtgttagaccggatccgatatgtgcagagtctcaaggaaattgtcatcaacgtgcctgagcagtcggctgtgactctcgacaatgtaactctgcaaatcgatggagtcctttacctgcgcatcatggacccttacaaggcaagctacggtgtggaggaccctgagtatgccgtcacccagctagctcaaacaaccatgagatcagagctcggcaaactctctctggacaaagtcttccgggaacgggagtccctgaatgccagcattgtggatgccatcaaccaagctgctgactgctggggtatccgctgcctccgttatgagatcaaggatatccatgtgccaccccgggtgaaagagtctatgcagatgcangtggaggcagagcggcggaaacgggccacagttctagagtctgaggggacccgagagtcggccatcaatgtggca

SEQ ID NO: 1032 - DNA, 116 bp, Homo sapiens
aaatatttatgtggaattaattaaaggtagttggctatatcgctatcatttcattcttttgacattatgtgaatattttactggaaaataagactaataaattgttaaaagttttt

SEQ ID NO: 1033 - DNA, 241 bp, Homo sapiens
caagggtcatgatggcaggagtaatcagaggtgttcttgtgttgtgataagggtggagaggttaaaggagccacttattagtaatgttgatagtagaatgatggctagggtgacttcatatgagattgtttgggctactgctcgcagtgcgccgatcagggcgtagtttgagtttgatgctcaccctgatcagaggattgagtaaacggctaggctagaggtggctagaataaataggagg

SEQ ID NO: 1034 - DNA, 234 bp, Homo sapiens
ccacagctgggcgcttcacccagtggtactttggtgcctactccattgtggcgggcgtgtttgtgtgcctgctggagtacccccgggggaagaggaagaagggctccaccatggagcgctggggacagaagcacatgaccgccgtggtgaagctgttcgggccctttaccaggaattactatgttcgggccgtcctgcatctcctgctctcggtgcccgccggcttcctgctgg

SEQ ID NO: 1035 - DNA, 434 bp, Homo sapiens
  misc_feature 39, 42, 48, 113, 135, 137, 151, 185, 219, 228, 250, 254,268, 271, 275, 307, 344, 355, 358, 369, 376, 404, 409, 416,427: n = A,T,C or G
gtacaagcttttttttttttttttttttttttttttttnggntacggnagcacttttatttttccttacacaatgacgtgttgctggggcctaatgttctcacataacagtanaaaaccaaaatttgttgtcatntnttcaaagaatcganaattgcgtacaaaaaaaaccttacataaattaanaatgaatacatttacaggcgtaaatgcaaaccgnttccaactnaaagcaagtaacagcccacggngttntggccaaagacatnagntaanaaaggaaactgggtcctacggcttggactttncaaccctgacagacccgcaagacaaaacaactggttnttgccagcctntanagaaatcccanaacactnagccctgacacgttaataccctgcacanatcanaggctgntggccacacanactcacc

SEQ ID NO: 1036 - DNA, 294 bp, Homo sapiens
aaagccatgggaacccagatcaccagatccggagcctgactctagcccctgagccacctgttgccctaacaccctgtctgactctctcccgctgcagcagccagtccctcctgcactccagcaactccagccatcagtcatcttccagatccttggaaagtccagccaactcttcctccagcctccacagccttggctcagtgtccctgtgtacaagacccagtgacttccaggctcccagaaaccccaccctaaccatgggccaacccagaacaccccactctccaccactgg

SEQ ID NO: 1037 - DNA, 547 bp, Homo sapiens
  misc_feature 55, 56, 64, 65, 258, 314, 513: n = A,T,C or G
aaagatatgaacagcttaattttccgtgtgattatctaattaaaaaagaaaaacnnaacaagcnnaatgttcaagttaaaaaaaaaacataccgggtgagcaatgcactaaaattatccacatgaaaacaaatggtctgtaatcttataaaccaacatagcatttcactgtcaacaatgtgaaaatttaatatcttctcaaacaggcataagatgaagaagtgctattttttaattgtaaaaggaacttatgtaatgntaaaattacattataatttttcattccgaattgacaaatgatttcaaaaacaaggnatcaaagtttgactgcaaatagtaatgcaatataatttcataaaaatccttcaatttctatttttttccttttctgtagttgacatatgaagaccacttcaatttctaaaaaagggaaccattccaattttccctccccaagaaaatgtctcacaattacaaagtagaaaaacagccgttcataaaatgcaaaaaaaanttctgattttatacatgaaataatttctagatca

SEQ ID NO: 1038 - DNA, 451 bp, Homo sapiens
ccactctgcccaggagctgccgaccatcaggacgcctgcagacatttacagagcctttgttgatgttgtgaatggagaatatgtccctcgcaaatccatcctgaagtctcgaagtagagagaatagtgtgtgtagcgacactagtgaaagcagtgctgctgaatttgatgataggcggggagttttgaggagtatcagctgcgaagaagccacttgcagtgacaccagtgagagcattttggaagaggaaccacaagaaaatcaaaagaaacttttgcccttatcagtaacacctgaggctttttctggaactgttatagaaaaagaatttgtatcaccttccttaacaccacccccagccattgctcatcccgcactacccactattccagaacgaaaggaagttctgttggaagcatctgaagaaactggaaagagggtttcaaagttt

SEQ ID NO: 1039 - DNA, 533 bp, Homo sapiens
ccaagcccgtgcaccgttttttgtaaggtatctctttaagcgcctgggaccccaagcgagagtccgaaattagcagagcgctaaaaggaggggcccgaaggcagtggggctttgagctagaagcctctttttacctgcttgacaggtaatttctgtaattggttgtgattgaatttgatagggtagagaattaaatgagggaagctgtgtatacttcctagtaagagctattatatgactgattacattaacatcatatggaaaaaaattgtcaaaagtactccgggaaagcccttaaatagttggtaaagtacagaacacatgattgtcaatatatgtaaatacaggatgagctaggacagaggggcccttctttcacaccacttaaattagttcccactttaaccttgtttgagattgacttctggagagttaaatgcagatagacttaactctcctaagtcaggtgagactgagagctgactgctacaataattacggagcccaaatgcagtaaaacagcctgtttttca

SEQ ID NO: 1040 - DNA, 317 bp, Homo sapiens
  misc_feature 149, 228: n = A,T,C or G
tgcctgctggggattactcgatcaaaaccttccttccctggctacttcccttcctcccggggccttccttttgaggagctggaggggtggggagctagaggccacctatgccagtgctcaaggttactgggagtgtgggctgcccttgntgcctgcacccttccctcttccctctccctctctctgggaccactgggtacaagagatgggatgctccgacagcgtctncaattatgaaactaatcttaacccctgtgctgtcagataccctgtttctggagtcacatcagtgaggagggatgtgggtaagaggagca

SEQ ID NO: 1041 - DNA, 407 bp, Homo sapiens
  misc_feature 45, 88, 184, 236, 238: n = A,T,C or G
ccaagacagtccacttacatggatcgtgtcttcaagcaatttgtncaagccatggttgagcatggacatgaactctcttaacatgtanttctttgggtgcattttgtctgaaccacaattgtgaaggcagctcagcttagtgcacaaattttaactgttgtatataaagcaaataagtcagcanatgggtgaagaggtccagaatgatatgcaaaaactactttttagagaaacanancaactttgtagcaacaaattaaatatagtattagattgttacttacgtagattttatttttactatgccttaccaagtacatccttaaacaaagtagtatgtacatgaaattgcacttaaccaaaactattgtgtaaaacaaatttttaattcctcagggttttaattt

SEQ ID NO: 1042 - DNA, 519 bp, Homo sapiens
  misc_feature 461: n = A,T,C or G
ccaccacacccaattccttgctggtatcatggcagccgccacgtgccaggattaccggctacatcatcaagtatgagaagcctgggtctcctcccagagaagtggtccctcggccccgccctggtgtcacagaggctactattactggcctggaaccgggaaccgaatatacaatttatgtcattgccctgaagaataatcagaagagcgagcccctgattggaaggaaaaagacagacgagcttccccaactggtaacccttccacaccccaatcttcatggaccagagatcttggatgttccttccacagttcaaaagacccctttcgtcacccaccctgggtatgacactggaaatggtattcagcttcctggcacttctggtcagcaacccagtgttgggcaacaaatgatctttgaggaacatggttttaggcggaccacaccggcccacaacggncacccccataaaggcataggccaaagaccatacccgccgaatgtaggacaagaaagct

SEQ ID NO: 1043 - DNA, 294 bp, Homo sapiens
ccatgacagcagctactgcttcacatagcagcatacgccacatgttcaccttcaatatttttccagtctgtctatctttctccacacagtagcagctatcatagaactctgtgaaagcagttgccagctcatatatataatcacagagagtgtggagaaataagtcatctaaaatcttttgcagaatctcagggaaccgtaaaatgcaccggcctagtttccattccttctcatgatccaaaagaatcttggtttctcgagcagctttttggagcatttcttcatcaatattgg

SEQ ID NO: 1044 - DNA, 384 bp, Homo sapiens
ccaggcgctccttgtcggcatcagggagggtggccttgaactgctcatgggctgtggtcagtccctggatctcctcaatggtgtgcacaatgaaggtgtcctgcaggtcctccatggccccctccatccagttgttgaagggtgcagcccgcttggcatactccaagtacagctggtcaatggtctccagcagtttctcggtccgctccagagcttcccttcgcttctgagttagggcccccagattgtcccactggtcacagatcttttggcaacgggcgttgacactgggtgagtcataatagtccagctcattgagctcctgtgcgatggcggcaatctgctccacacggtcctggtgggcagccaggtcactctcgaagg

SEQ ID NO: 1045 - DNA, 456 bp, Homo sapiens
  misc_feature 118, 119: n = A,T,C or G
aaaactaatgttacaaatctgtattatcacttgtatataaatagtatatagctgatcattaataaggtgtataagtacaatgtattctaaaactgttaagcaaaaaaaaaaaacaaannaaaaatccaagtgtcctcctccaccactcacgctggtgatcactgtgctctctgccagctgcgtggagtgacgggaggagggaatcactgtgtgtgcgagagtgcttcagactcaatttccaaaataattttcacccctctaagcatgtaaatatacaaagatggatccttcatagaaattaaaaaatcaatttgagctcatttcgaatacagaacaagtatggcacagatggaagtcctgccacgtttcctttaatgatgctgactcttgtatcacacaggccagcatgaagtttcttactcagactttacaggcattttccgtaattcaatcagt

SEQ ID NO: 1046 - DNA, 136 bp, Homo sapiens
  misc_feature 3, 27, 80, 97, 104: n = A,T,C or G
atnatctgtttctaaacgaaagctgcngcggaatgagagtgagccttcagagatgaaagccatggctctgaaaggtggcngggcagaaggaaccctncgttcanctaaaagtgaggagtctcttacatctctccat

SEQ ID NO: 1047 - DNA, 453 bp, Homo sapiens
aaaaaaatccaaatgctggcattgtccagaaaaatttaacaggtttatttataattattataaagttgaaccgctgaaacttgttcactgaaacattttaacttgcattaatgctttacgtctccgcatttatattaaaaattcacacacaaatgaaaatggaaaaactgccaatacctgatttctgtcccctatttttccactcgcaatcatatacttaggtaccttttgaccccatggaaaaaaaatatctaacgttcagaactaccaataacaggaagaagagaaattttttttttttttttgggaatgaaatgtttcccatcatagtggattcttaagcacgttctccacgtatgcggcgtgctagctggatgtcttttggcataattgttacacgtttggcatggatagcacacaggttggtgtcttcaaaaaggccaaccagatagg

SEQ ID NO: 1048 - DNA, 219 bp, Homo sapiens
  misc_feature 13: n = A,T,C or G
aaaatcacaaacnttaacggcagtaggcaccaccatgtaaaagtgagctcagacgtctctaaaaaatgtttcctttataaaagcacatggcggttgaatcttaaggttaaattttaatatgaaagatcctcatgaattaaatagttgatgcaatttttaacgttaattgatataaaaaaaaacaacaaaattaggcttgtaaaactgactttttcatta

SEQ ID NO: 1049 - DNA, 2465 bp, Homo sapiens
agcaaataatcaatttagcattacaaaaaacagggatggtagggaaaatagaaggagaaaactctaaaataggtgatgataatgaaaatttaacctttaaattagaagtaaatgagctgagtggtaaattagacaacactaacgaatacaatagtaatgatggtaagaaattaccccagggtgaatcacgaagttacgaagtcatgggaagtatggaagaaaccttatgcaatatagatgacagagatggaaatcgcaatgtccatttagaatttacagaaagagagagtaggaaggatggagaggatgaatttgtcaaagaaatgagagaggaaagaaaatttcagaaattgaagaataaagaggaggttttaaaagcctccagagaagaaaaagtgttgatggatgaaggagcagtacttaccctggcagccgacctttcatcagcaacactggatattagtaagcaatggagtaatgtcttcaacattctgagagaaaatgattttgaacctaaatttctgtgtgaagttaaattagcatttaaatgtgatggtgaaataaagacattttcagatctgcaaagccttagaaaatttgccagccaaaaatcttctatgaaagaattactgaaagatgtactcccacaaaaggaagaaataaatcaaggaggaagaaaatatggaattcaagaaaaaagggataaaaccctaatagactcaaagcatagagctggagaaataaccagtgatggcttgagcttcctatttcttaaagaagtaaaagttgctaagccagaggagatgaaaaacttagagactcaagaggaagagttttccgagctagaggagctggatgaagaggcctcagggatggaggatgatgaagatacctcagggctggaggaggaggaggaagagccctcagggctggaggaggaagaagaagaagaggcttcagggttggaggaggatgaggcctcagggctagaggaggaagaggaacagacttcagaacaggactcaacctttcagggtcatactttggtagatgcaaagcatgaagttgagataaccagtgatggcatggaaactactttcattgactctgtagaggattctgaatcagaggaggaagaagaaggaaagagctctgaaacaggaaaggtaaagactacctccctgactgagaaaaaagcctcacgtagacaaaaagaaattccctttagttatttggttggggactctgggaagaaaaagttggtgaaacaccaggtggtgcacaaaacccaggaggaagaggaaacagctgtgcccacaagtcaaggaactggcacaccctgtctgaccttatgttaggcctctccctcaaagtcactagagatgagtcatgatgagcataaaaagcattcacatacaaatttgagtatttcaacaggagtcaccaaacttaagaaaacagaagaaaagaaacacagaactctgcacacagaagaactaacatccaaagaagcagacttaacagaggaaacagaagaaaacttgagaagtagtgtgattaatagcatcagagagataaaagaggagattggaaatttgaaaagttcccattcaggtgtcttggaaattgaaaattcagtagatgatctgagtagcagaatggacatacttgaagaaagaatagacagtctagaagatcaaattgaagaattctctaaggatacaatgcaaatgaccaaacagataattagtaaagaaaggcaaagagatatagaggagagatctagaagttgcaacattcgtttgataggaattccagaaaaggagagttatgagaatagggcagaggacataattaaagaaataattgatgaaaactttgcagaactaaagaaaggttcaagtcttgagattgtcagtgcttgtcgagtacctagtaaaattgatgaaaagagactgactcctagacacatcttggtgaaattttggaattctagtgataaagagaaaataataagggcttctagagagagaagagaaattacctaccaaggaacaagaatcaggttgacagcagacttatcactggacacactggatgctagaagtaaatggagcaatgtcttcaaagttctgctggaaaaaggctttaatcctagaatcctatatccagccaaaatggcatttgattttaggggtaaaacaaaggtatttcttagtattgaagaatttagagattatgttttgcatatgcccaccttgagagaattactggggaataatataccttagcacgccagggtgactacaaacaatatgctttcctcccccagcatgcatccaaaaatcaacaagtaaaacgaaaatacacttctacccagaaggatggacagctaatagcgtacttggggatgaggagcaaggaatattacagatattacctagatgttaataaagggtatgttt

SEQ ID NO: 1050 - DNA, 3120 bp, Homo sapiens
aaaggaaacacaagttgcttttgataacacatgatgcaaagaaagaattagaaagaatgagcaatgaagccggtataaatgacaaacaagtgtccaaaggcccaagaagttactaccaaaagctttcaaacaatattggtttatctttaaagacacatccatagcatactttaaaaataaggaacttgaacaaggagaaccacaagaaaaactaaatcttagaggctgcgaagttgtgcccgatgtaaatgtagcaggaagaaaatttggaatcaagttactaatccctgttgccgatggtatgaatgaaatgtatttgagatgtgaccatgagaatcaatacgcccaatggatggctgcctgcatgttggcatcgaagggcaaaaccatggcagacagctcctaccagccagaggtcctcaacatcctttcatttctgaggatgaaaaacaggaactctgcatctcaggtggcttccagtctcgaaaacatggatatgaacccagaatgttttgtgtcaccacggtgtgcaaaaagacacaaatccaaacagctggccgcccggatcctggaggcgcaccagaacgtggcccagatgcccctggtcgaagccaagctgcggttcatccaggcgtggcagtcactgcctgagtttggcctcacctactaccttgtcagatttaaaggaagcaaaaaagatgacattctgggagtttcatataacaggttgattaaaattgatgcagccaccgggattccagtgacaacatggagattcacaaatatcaaacagtggaatgtaaactgggaaacccggcaggtggtcatcgagtttgaccaaaacgtctttactgctttcacctgcctgagtgcagattgcaagattgtgcacgagtacattggcggctacattttcttgtccacccgctccaaggaccagaatgaaacactcgatgaggacttgttccacaaattgaccggcggtcaggattgaaacaagcacgcgtgctcggctcacaccaacaaggcaagccaaaggcgcccctccccagagggatccctaacgtgcccagcatgtagattctggactaacagacaacatacattcaccgctggtcacccagatcctcattcaaacccactgctggcacatccctttccttactttgccctgtgctaccagccacggaaggagcctctcttgttttttctataaaatgggtaggcaggagaaaagcaggtgccctaagattgctctaaggcccagcatgtggttacagttctctgacttgcagaacctgccaggtgtatggctacaagttatcctcgtgctgatctgtctcattactaagtcaatggagaagacagaaaggtaaaaatcacgtgtagcaagaacaactcttatttcacaaactcaggtatgaaacgaaacgcctgtccttcatggaactgcttttagctcctgtcttttcaaaatggcagagggagttcctacacacactttttccctggaggccaaggtctaggggtagaaaggggaggggtggggctaccaggtagcagttgacaacccaaggtcagaggagtggccctcagtgtcatctgtccacagtgatacctgccaagatgaccactgacccacatctggtcttagtcattggtctcctcagatttctggggccacctgcaagccccattccattcctacagatctctcagccacctgtaagtcctttgtgaagatgtgggtgacacagggggacaggaaaacccatttctcaacccagatccatgtctccactgcttctactctgggttgggattcaggaagacaggcacagtcctctctgttcatagaaacacctgccagtgtcaaggattccagtcaggtgtctatcccaactggtcagggagagaagggcagacccattctcaaagaccaccatgttcaaggtctgacagctccccactggctgcccccacaggggctttaggctggtctgggtcatggggaagcgtccctcttatcgctggtctgtgttctcctggatttggtatctatgttggtacgactcctggccttttatctaaaggactttggcttttgtaaatcacaagccaataatagacttttttctccccctctgttttttgctgtgtcatctctgccttgagactgccttgagacagtgcttgccctgagagagtgagccaattaacagctgcctgaattgtcattttccattttggtttgttagaggtgggaggggtgggttttgagaaggtcaaaagcaataccagaagtaaagggaaatatcagacaatattttattattttttcatagatgttctgccacacaaagaacttggggtgtaaggataaggcaaaagctccaatcccatttttcagttctcctaggatgcacccctcagggagcctggccagagttccgaggcccgtgagcgtcagctgttgctttattttccatcaaagccctctgagaagtgagacctcagcaattccgggagccacatagagacagacttggcaagggaccccctggttctgagccagtagctgccatctggaaattcctcttttagcctctccttagaggtgaatgtgaatgaagcctcccaggcacccgctgaatttctgaggccttgcttaaagctcagaagtggtttaggcatttggaaaatctggttcacatcataaagaacttgatttgaaatgttttctatagaaacaagtgctaagtgtaccgtattatacttgatgttggtcatttctcagtcctatttctcagttctattattttagaacctagtcagttctttaagattataactggtcctacattaaaataatgcttctcgatgtcagattttacctgtttgctgctgagaacatctctgcctaatttaccaaagccagaccttcagttcaacatgcttccttagcttttcatagttgtctgacatttccatgaaaacaaaggaaccaactttgttttaaccaaactttgtttggttacagttttcaggggagcgtttcttccatgacacacagcaacatcccaaagaaataaacaagtgtgacaaaaaaaaaaaaaaaaa

SEQ ID NO: 1051 - DNA, 1745 bp, Homo sapiens
gcgcccctggcagccttcaacgtcggtccccaggcagcatggtgaggtctgctcccggaccctcgccaccatgtacgtgagctacctcctggacaaggacgtgagcatgtaccctagctccgtgcgccactctggcggcctcaacctggcgccgcagaacttcgtcagccccccgcagtacccggactacggcggttaccacgtggcggccgcagctgcagcgcagaacttggacagcgcgcagtccccggggccatcctggccggcagcgtatggcgccccactccgggaggactggaatggctacgcgcccggaggcgcggccgccgccaacgccgtggctcacgcgctcaacggtggctccccggccgcagccatgggctacagcagccccgcagactaccatccgcaccaccacccgcatcaccacccgcaccacccggccgccgcgccttcctgcgcttctgggctgctgcaaacgctcaaccccggccctcctgggcccgccgccaccgctgccgccgagcagctgtctcccggcggccagcggcggaacctgtgcgagtggatgcggaagccggcgcagcagtccctcggcagccaagtgaaaaccaggacgaaagacaaatatcgagtggtgtacacggaccaccagcggctggagctggagaaggagtttcactacagtcgctacatcaccatccggaggaaagccgagctagccgccacgctggggctctctgagaggcaggttaaaatctggtttcagaaccgcagagcaaaggagaggaaaatcaacaagaagaagttgcagcagcaacagcagcagcagccaccacagccgcctccgccgccaccacagcctccccagcctcagccaggtcctctgagaagtgtcccagagcccttgagtccggtgtcttccctgcaagcctcagtgtctggctctgtccctggggttctggggccaactgggggggtgctaaaccccaccgtcacccagtgacccaccggggtctgcagcggcagagcaattccaggctgagccatgaggagcgtggactctgctagactcctcaggagagacccctcccctcccacccacagccatagacctacagacctggctctcagaggaaaaatgggagccaggagtaagacaagtgggatttggggcctcaagaaatatactctcccagatttttactttttccatctggctttttctgccactgaggagacagaaagcctccgctgggcttcattccggactggcagaagcattgcctggactgaccacaccaaccagcttcatctatccgactcttctcttcctagatctgcaggctgcacctctggctagagccgaggggagagagggactcaagggaaaggcaagcttgaggccaagatggctgctgcctgctcatggccctcggaggtccagctgggcctcctgcctccgggcagcaaggtttacactgcggaacgcaaaggcagctaagatagaaagctggactgaccaaagactgcagaacccccaggtggccctgcgtcttttttctcttccctttcccagaccaggaaaggcttggctggtgtatgcacagggtgtggtatgagggggtggttattggactccaggcctgaccagggggcccgaacaggacttgttagagagcctgtcaccagagcttctctgggctgaatgtatgtcagtgctataaatgccagagccaacctgg

SEQ ID NO: 1052 - DNA, 1104 bp, Homo sapiens
ctctagagtcgagatccattgtgctctaaagtggatacagaaatctctgcaggcaagttgctccagagcatattgcaggacaagcctgtaacgaatagttaaattcacggcatctggattcctaatccttttccgaaatggcaggtgtgagtgcctgtataaaatattctatgtttaccttcaacttcttgttctggctatgtggtatcttgatcctagcattagcaatatgggtacgagtaagcaatgactctcaagcaatttttggttctgaagatgtaggctctagctcctacgttgctgtggacatattgattgctgtaggtgccatcatcatgattctgggcttcctgggatgctgcggtgctataaaagaaagtcgctgcatgcttctgttgtttttcataggcttgcttctgatcctgctcctgcaggtggcgacaggtatcctaggagctgttttcaaatctaagtctgatcgcattgtgaatgaaactctctatgaaaacacaaagcttttgagcgccacaggggaaagtgaaaaacaattccaggaagccataattgtgtttcaagaagagtttaaatgctgcggtttggtcaatggagctgctgattggggaaataattttcaacactatcctgaattatgtgcctgtctagataagcagagaccatgccaaagctataatggaaaacaagtttacaaagagacctgtatttctttcataaaagacttcttggcaaaaaatttgattatagttattggaatatcatttggactggcagttattgagatactgggtttggtgttttctatggtcctgtattgccagatcgggaacaaatgaatctgtggatgcatcaacctatcgtcagtcaaacccctttaaaatgttgctttggctttgtaaatttaaatatgtaagtgctatataagtcaggagcagctgtctttttaaaatgtctcggctagctagaccacagatatcttctagacatattgaacacatttaagatttgagggatataagggaaaatgatatgaatgtgtatttttactcaaaataaaagtaactgtttaaaaaaaaaaaaaaaaaaaaa

SEQ ID NO: 1053 - DNA, 480 bp, Homo sapiens
cagtcctgagctgcgtcccggagcccacggtggtcatggctgccagagcgctctgcatgctggggctggtcctggccttgctgtcctccagctctgctgaggagtacgtgggcctgtctgcaaaccagtgtgccgtgccagccaaggacagggtggactgcggctacccccatgtcacccccaaggagtgcaacaaccggggctgctgctttgactccaggatccctggagtgccttggtgtttcaagcccctgcaggaagcagaatgcaccttctgaggcacctccagctgcccccggccgggggatgcgaggctcggagcacccttgcccggctgtgattgctgccaggcactgttcatctcagcttttctgtccctttgctcccggcaagcgcttctgctgaaagttcatatctggagcctgatgtcttaacgaataaaggtcccatgctccacccgaggacagttcttcgtgcctg

SEQ ID NO: 1054 - DNA, 1078 bp, Homo sapiens
cagccactagcgcagctcgagcgatggcctatgtccccgcaccgggctaccagcccacctacaacccgacgctgccttactaccagcccatcccgggcgggctcaacgtgggaatgtctgtttacatccaaggagtggccagcgagcacatgaagcggttcttcgtgaactttgtggttgggcaggatccgggctcagacgtcgccttccacttcaatccgcggtttgacggctgggacaaggtggtcttcaacacgttgcagggcgggaagtggggcagcgaggagaggaagaggagcatgcccttcaaaaagggtgccgcctttgagctggtcttcatagtcctggctgagcactacaaggtggtggtaaatggaaatcccttctatgagtacgggcaccggcttcccctacagatggtcacccacctgcaagtggatggggatctgcaacttcaatcaatcaacttcatcggaggccagcccctccggccccagggacccccgatgatgccaccttaccctggtcccggacattgccatcaacagctgaacagcctgcccaccatggaaggacccccaaccttcaacccgcctgtgccatatttcgggaggctgcaaggagggctcacagctcgaagaaccatcatcatcaagggctatgtgcctcccacaggcaagagctttgctatcaacttcaaggtgggctcctcaggggacatagctctgcacattaatccccgcatgggcaacggtaccgtggtccggaacagccttctgaatggctcgtggggatccgaggagaagaagatcacccacaacccatttggtcccggacagttctttgatctgtccattcgctgtggcttggatcgcttcaaggtttacgccaatggccagcacctctttgactttgcccatcgcctctcggccttccagagggtggacacattggaaatccagggtgatgtcaccttgtcctatgtccagatctaatctattcctggcataactcatgggaaaacagaattatcccctagactcctttctaagcccctaataaaatgtctgagggtgtc

SEQ ID NO: 1055 - DNA, 2872 bp, Homo sapiens
aggaacaggccgcacacaacagcattccctggcagtaccaccatgccaggcgtcagtcaggaatctacagcttcccacagcagcccaggctccacagacacaacactgtcccctggcagtaccacagcatcatcccttggtccagaatctactaccttccacagcggcccaggctccactgaaacaacactcttacctgacaacaccacagcctccggcctccttgaagcatctacgcccgtccacagcagcactggatcgccacacacaacactgtcccctgccggctctacaacccgtcagggagaatctaccaccttccagagctggcctaactcgaaggacactacccctgcacctcctactaccacatcagcctttgttgagctatctacaacctcccacggcagcccgagctcaactccaacaacccacttttctgccagctccacaaccttgggccgtagtgaggaatcgacaacagtccacagcagcccagttgcaactgcaacaacaccctcgcctgcccgctccacaacctcaggcctcgttgaagaatctacgacctaccacagcagcccgggctcaactcaaacaatgcacttccctgaaagcgacacaacttcaggccgtggtgaagaatcaacaacttcccacagcagcacaacacacacaatatcttcagctcctagcaccacatctgcccttgttgaagaacctaccagctaccacagcagcccgggctcaactgcaacaacacacttccctgacagctccacaacctcaggccgtagtgaggaatcaacagcatcccacagcaaccaagacgcaacgggaacaatagtcctacctgcccgctccacaacctcagttcttcttggagaatctacgacctcacccatcagttcaggctcaatggaaacgacagcgttacccggcagtaccacaacgccaggcctcagtgagaaatctaccactttccacagtagccccagatcaccagccacaacactctcacctgccagcacgacaagctcaggcgtcagtgaagaatccaccacctcccacagccgaccaggctcaacgcacacaacagcattccctgacagcaccaccacgccaggcctcagtcggcattctacaacttcccacagcagcccaggctcaacggatacaacactgttacctgccagcaccaccacctcaggccccagtcaggaatcaacaacttcccacagcagcccaggttcaactgacacagcactgtcccctggcagtaccacagccttatcctttggtcaagaatctacaaccttccacagcagcccaggctccactcacacaacactcttccctgacagcaccacaagctcaggcatcgttgaagcatctacacgcgtccacagcagcactggctcaccacgcacaacactgtcccctgccagctccacaagccctggacttcagggagaatctaccgccttccagacccacccagcctcaactcacacgacgccttcaactcctagcaccgcaacagcccctgttgaagaatctacaacctaccaccgcagcccaagctcgactccaacaacacacttccctgccagctccacaacttcgggccacagtgagaaatcaacaatattccacagcagcccagatgcaagtggaacaacaccctcatctgcccactccacaacctcaggtcgtggagaatctacaacctcacgcatcagtccaggctcaactgaaataacaacgttacctggcagtaccacaacaccaggcctcagtgaggcatctaccaccttctacagcagccccagatcaccaaccacaacactctcacctgccagcatgacaagcctaggcgtcggtgaagaatccaccacctcccgtagccaaccaggttctactcactcaacagtgtcacctgccagcaccaccacgccaggcctcagtgaggaatctaccaccgtctacagcagcagcccaggctcaactgaaaccacagtgttccctcgcagcaccacaacctcagttcgtggtgaagagcctacaaccttccacagccggccagcctcaactcacacaacactgttcactgaggacagcaccacctcgggcctcactgaagaatctacagccttccccggcagcccagcctccacccaaacagggttacctgccacactcacaaccgcagacctcggtgaggaatcaactacctttcccagcagctcaggctcaactggaacaacactctcacctgcccgctccaccacctctggcctcgttggagaatccacaccctcacgcctcagtccaagctcaaccgaaacaacaactttacccggcagtcccacaacaccaagcctcagtgagaaatcaaccaccttctacactagccccagatcaccagatgcaacactctcacctgcaaccacaacaagctcaggcgtcagcgaagaatccagcacatcccacagtcaaccaggctcaacgcacacaacagcgttccctgacagcaccaccacctcaggcctcagtcaggaacctaaaacttcccacagcagccaaggctcaacagaggcaacactgtcccctggcagtaccacagcctcatcccttggtcaacaatctacaaccttccacagcagcccaggcgacactgaaaccacactcttacctgatgacaccataacctcaggcctcgtggaggcatctacacccacccacagcagcactggctcgctacacacaacactgacccctgccagctccacaagcgctggccttcaggaagaatctactactttccagagctggccaagctcaagtgacacaacaccttcacctcccggcccgg

SEQ ID NO: 1056 - DNA, 3311 bp, Homo sapiens
tgctaatgcttttggtacaaatggatgtggaatataattgaatattttcttgtttaaggggagcatgaagaggtgttgaggttatgtcaagcatctggcacagctgaaggcagatggaaatatttacaagtacgcaatttgagactaagatattgttatcattctcctattgaagacaagagcaatagtaaaacacatcaggtcagggggttaaagacctgtgataaaccacttccgataagttggaaacgtgtgtctatattttcatatctgtatatatataatggtaaagaaagacaccttcgtaacccgcattttccaaagagaggaatcacagggagatgtacagcaatggggccatttaagagttctgtgttcatcttgattcttcaccttctagaaggggccctgagtaattcactcattcagctgaacaacaatggctatgaaggcattgtcgttgcaatcgaccccaatgtgccagaagatgaaacactcattcaacaaataaaggacatggtgacccaggcatctctgtatctgtttgaagctacaggaaagcgattttatttcaaaaatgttgccattttgattcctgaaacatggaagacaaaggctgactatgtgagaccaaaacttgagacctacaaaaatgctgatgttctggttgctgagtctactcctccaggtaatgatgaaccctacactgagcagatgggcaactgtggagagaagggtgaaaggatccacctcactcctgatttcattgcaggaaaaaagttagctgaatatggaccacaaggtaaggcatttgtccatgagtgggctcatctacgatggggagtatttgacgagtacaataatgatgagaaattctacttatccaatggaagaatacaagcagtaagatgttcagcaggtattactggtacaaatgtagtaaagaagtgtcagggaggcagctgttacaccaaaagatgcacattcaataaagttacaggactctatgaaaaaggatgtgagtttgttctccaatcccgccagacggagaaggcttctataatgtttgcacaacatgttgattctatagttgaattctgtacagaacaaaaccacaacaaagaagctccaaacaagcaaaatcaaaaatgcaatctccgaagcacatgggaagtgatccgtgattctgaggactttaagaaaaccactcctatgacaacacagccaccaaatcccaccttctcattgctgcagattggacaaagaattgtgtgtttagtccttgacaaatctggaagcatggcgactggtaaccgcctcaatcgactgaatcaagcaggccagcttttcctgctgcagacagttgagctggggtcctgggttgggatggtgacatttgacagtgctgcccatgtacaaagtgaactcatacagataaacagtggcagtgacagggacacactcgccaaaagattacctgcagcagcttcaggagggacgtccatctgcagcgggcttcgatcggcatttactgtgattaggaagaaatatccaactgatggatctgaaattgtgctgctgacggatggggaagacaacactataagtgggtgctttaacgaggtcaaacaaagtggtgccatcatccacacagtcgctttggggccctctgcagctcaagaactagaggagctgtccaaaatgacaggaggtttacagacatatgcttcagatcaagttcagaacaatggcctcattgatgcttttggggccctttcatcaggaaatggagctgtctctcagcgctccatccagcttgagagtaagggattaaccctccagaacagccagtggatgaatggcacagtgatcgtggacagcaccgtgggaaaggacactttgtttcttatcacctggacaacgcagcctccccaaatccttctctgggatcccagtggacagaagcaaggtggctttgtagtggacaaaaacaccaaaatggcctacctccaaatcccaggcattgctaaggttggcacttggaaatacagtctgcaagcaagctcacaaaccttgaccctgactgtcacgtcccgtgcgtccaatgctaccctgcctccaattacagtgacttccaaaacgaacaaggacaccagcaaattccccagccctctggtagtttatgcaaatattcgccaaggagcctccccaattctcagggccagtgtcacagccctgattgaatcagtgaatggaaaaacagttaccttggaactactggataatggagcaggtgctgatgctactaaggatgacggtgtctactcaaggtatttcacaacttatgacacgaatggtagatacagtgtaaaagtgcgggctctgggaggagttaacgcagccagacggagagtgataccccagcagagtggagcactgtacatacctggctggattgagaatgatgaaatacaatggaatccaccaagacctgaaattaataaggatgatgttcaacacaagcaagtgtgtttcagcagaacatcctcgggaggctcatttgtggcttctgatgtcccaaatgctcccatacctgatctcttcccacctggccaaatcaccgacctgaaggcggaaattcacgggggcagtctcattaatctgacttggacagctcctggggatgattatgaccatggaacagctcacaagtatatcattcgaataagtacaagtattcttgatctcagagacaagttcaatgaatctcttcaagtgaatactactgctctcatcccaaaggaagccaactctgaggaagtctttttgtttaaaccagaaaacattacttttgaaaatggcacagatcttttcattgctattcaggctgttgataaggtcgatctgaaatcagaaatatccaacattgcacgagtatctttgtttattcctccacagactccgccagagacacctagtcctgatgaaacgtctgctccttgtcctaatattcatatcaacagcaccattcctggcattcacattttaaaaattatgtggaagtggataggagaactgcagctgtcaatagcctagggctgaatttttgtcagataaataaaataaatcattcatcctttttttgattataaaattttctaaaatgtattttagacttcctgtagggggcgatatactaaatgtatatagtacatttatactaaatgtattcctgtagggggcgatatactaaatgtattttagacttcctgtagggggcgataaaataaaatgctaaacaactgggtaaa

SEQ ID NO: 1057 - DNA, 2095 bp, Homo sapiens
aaacactctcacctgccagcatgagaagctccagcatcagtggagaacccaccagcttgtatagccaagcagagtcaacacacacaacagcgttccctgccagcaccaccacctcaggcctcagtcaggaatcaacaactttccacagtaagccaggctcaactgagacaacactgtcccctggcagcatcacaacttcatcttttgctcaagaatttaccacccctcatagccaaccaggctcagctctgtcaacagtgtcacctgccagcaccacagtgccaggccttagtgaggaatctaccaccttctacagcagcccaggctcaactgaaaccacagcgttttctcacagcaacacaatgtccattcatagtcaacaatctacacccttccctgacagcccaggcttcactcacacagtgttacctgccaccctcacaaccacagacattggtcaggaatcaacagccttccacagcagctcagacgcaactggaacaacacccttacctgcccgctccacagcctcagaccttgttggagaacctacaactttctacatcagcccatcccctacttacacaacactctttcctgcgagttccagcacatcaggcctcactgaggaatctaccaccttccacaccagtccaagcttcacttctacaattgtgtctactgaaagcctggaaaccttagcaccagggttgtgccaggaaggacaaatttggaatggaaaacaatgcgtctgtccccaaggctacgttggttaccagtgcttgtcccctctggaatccttccctgtagaaaccccggaaaaactcaacgccactttaggtatgacagtgaaagtgacttacagaaatttcacagaaaagatgaatgacgcatcctcccaggaataccagaacttcagtaccctcttcaagaatcggatggatgtcgttttgaagggcgacaatcttcctcagtatagaggggtgaacattcggagattgctcaacggtagcatcgtggtcaagaacgatgtcatcctggaggcagactacactttagagtatgaggaactgtttgaaaacctggcagagattgtaaaggccaagattatgaatgaaactagaacaactcttcttgatcctgattcctgcagaaaggccatactgtgctatagtgaagaggacactttcgtggattcatcggtgactccgggctttgacttccaggagcaatgcacccagaaggctgccgaaggatatacccagttctactatgtggatgtcttggatgggaagctggcctgtgtgaacaagtgcaccaaaggaacgaagtcgcaaatgaactgtaacctgggcacatgtcagctgcaacgcagtggcccccgctgcctgtgcccaaatacgaacacacactggtactggggagagacctgtgaattcaacatcgccaagagcctcgtgtatgggatcgtgggggctgtgatggcggtgctgctgctcgcattgatcatcctaatcatcttattcagcctatcccagagaaaacggcacagggaacagtatgatgtgcctcaagagtggcgaaaggaaggcacccctggcatcttccagaagacggccatctgggaagaccagaatctgagggagagcagattcggccttgagaacgcctacaacaacttccggcccaccctggagactgttgactctggcacagagctccacatccagaggccggagatggtagcatccactgtgtgagccaacgggggcctcccaccctcatctagctctgttcaggagagctgcaaacacagagcccaccacaagcctccggggcgggtcaagaggagaccgaagtcaggccctgaagccggtcctgctctgagctgacagacttggccagtcccctgcctgtgctcctgctggggaaggctgggggctgtaagcctctccatccgggagcttccagactcccagaagcctcggcacccctgtctcctcctgggtggctccccactctggaatttccctaccaataaaagcaaatctgaaagctcaaaaaaaaaaaaaaaaaaaaaaaaaaaaaaaaaaaa

SEQ ID NO: 1058 - DNA, 15720 bp, Homo sapiens
caacccacaccgcccctgccagccaccatggggctgccactagcccgcctggcggctgtgtgcctggccctgtctttggcagggggctcggagctccagacagagggcagaacccgataccacggccgcaacgtctgcagcacctggggcaacttccactacaagaccttcgacggggacgtcttccgcttccccggcctctgcgactacaacttcgcctccgactgccgaggctcctacaaggaatttgctgtgcacctgaagcggggtccgggccaggctgaggcccccgccggggtggagtccatcctgctgaccatcaaggatgacaccatctacctcacccgccacctggctgtgcttaacggggccgtggtcagcaccccgcactacagccccgggctgctcattgagaagagcgatgcctacaccaaagtctactcccgcgccggcctcaccctcatgtggaaccgggaggatgcactcatgctggagctggacactaagttccggaaccacacctgtggcctctgcggggactacaacggcctgcagagctattcagaattcctctctgacggcgtgctcttcagtcccctggagtttgggaacatgcagaagatcaaccagcccgatgtggtgtgtgaggatcccgaggaggaggtggcccccgcatcctgctccgagcaccgcgccgagtgtgagaggctgctgaccgccgaggccttcgcggactgtcaggacctggtgccgctggagccgtatctgcgcgcctgccagcaggaccgctgccggtgcccgggcggtgacacctgcgtctgcagcaccgtggccgagttctcccgccagtgctcccacgccggcggccggcccgggaactggaggaccgccacgctctgccccaagacctgccccgggaacctggtgtacctggagagcggctcgccctgcatggacacctgctcacacctggaggtgagcagcctgtgcgaggagcaccgcatggacggctgtttctgcccagaaggcaccgtatatgacgacatcggggacagtggctgcgttcctgtgagccagtgccactgcaggctgcacggacacctgtacacaccgggccaggagatcaccaatgactgcgagcagtgtgtctgtaacgctggccgctgggtgtgcaaagacctgccctgccccggcacctgtgccctggaaggcggctcccacatcaccaccttcgatgggaagacgtacaccttccacggggactgctactatgtcctggccaagggtgaccacaacgattcctacgctctcctgggcgagctggccccctgtggctccacagacaagcagacctgcctgaagacggtggtgctgctggctgacaagaagaagaatgcggtggtcttcaagtccgatggcagtgtactgctcaaccagctgcaggtgaacctgccccacgtgaccgcgagcttctctgtcttccgcccgtcttcctaccacatcatggtgagcatggccattggcgtccggctgcaggtgcagctggccccagtcatgcaactctttgtgacactggaccaggcctcccaggggcaggtgcagggcctctgcgggaacttcaacggcctggaaggtgacgacttcaagacggccagcgggctggtggaggccacgggggccggctttgccaacacctggaaggcacagtcaacctgccatgacaagctggactggttggacgatccctgctccctgaacatcgagagcgccaactacgccgagcactggtgctccctcctgaagaagacagagaccccctttggcaggtgccactcggctgtggaccctgctgagtattacaagaggtgcaaatatgacacgtgtaactgtcagaacaatgaggactgcctgtgcgccgccctgtcctcctacgcgcgcgcctgcaccgccaagggcgtcatgctgtggggctggcgggagcatgtctgcaacaaggatgtgggctcctgccccaactcgcaggtcttcctgtacaacctgaccacctgccagcagacctgccgctccctctccgaggccgacagccactgtctcgagggctttgcgcctgtggacggctgcggctgccctgaccacaccttcctggacgagaagggccgctgcgtacccctggccaagtgctcctgttaccaccgcggtctctacctggaggcgggggatgtggtcgtcaggcaggaagaacgatgtgtgtgccgggatgggcggctgcactgtaggcagatccggctgatcggccagagctgcacggccccaaagatccacatggactgcagcaacctgactgcactggccacctcgaagccccgagccctcagctgccagacgctggccgccggctattaccacacagagtgtgtcagtggctgtgtgtgccccgacgggctgatggatgacggccggggtggctgcgtggtggagaaggaatgcccttgcgtccataacaacgacctgtattcttccggcgccaagatcaaggtggactgcaatacctgcacctgcaagagaggacgctgggtgtgcacccaggctgtgtgccatggcacctgctccatttacgggagtggccactacatcacctttgatgggaagtactacgactttgacggacactgctcctacgtggctgttcaggactactgcggccagaactcctcactgggctcattcagcatcatcaccgagaacgtcccctgtggcactacgggcgtcacctgctccaaggccatcaagatcttcatggggaggacggagctgaagttggaagacaagcaccgtgtggtgatccagcgtgatgagggtcaccacgtggcctacaccacgcgggaggtgggccagtacctggtggtggagtccagcacgggcatcatcgtcatctgggacaagaggaccaccgtgttcatcaagctggctccctcctacaagggcaccgtgtgtggcctgtgtgggaactttgaccaccgctccaacaacgacttcaccacgcgggaccacatggtggtgagcagcgagctggacttcgggaacagctggaaggaggcccccacctgcccagatgtgagcaccaaccccgagccctgcagcctgaacccgcaccgccgctcctgggccgagaagcagtgcagcatcctcaaaagcagcgtgttcagcatctgccacagcaaggtggaccccaagcccttctacgaggcctgtgtgcacgactcgtgctcctgtgacacgggtggggactgtgagtgcttctgctctgccgtggcctcctacgcccaggagtgtaccaaagagggggcctgcgtgttctggaggacgccggacctgtgccccatattctgcgactactacaaccctccgcatgagtgtgagtggcactatgagccatgtgggaaccggagcttcgagacctgcaggaccatcaacggcatccactccaacatctccgtgtcctacctggagggctgctacccccggtgccccaaggacaggcccatctatgaggaggatctgaagaagtgtgtcactgcagacaagtgtggctgctatgtcgaggacacccactacccacctggagcatcggttcccaccgaggagacctgcaagtcctgcgtgtgtaccaactcctcccaagtcgtctgcaggccggaggaaggaaagattcttaaccagacccaggatggcgccttctgctactgggagatctgtggccccaacgggacggtggagaagcacttcaacatctgttccattacgacacgcccgtccaccctgaccaccttcaccaccatcaccctccccaccacccccacctccttcaccactaccaccaccaccaccaccccgacctccagcacagttttatcaacaactccgaagctgtgctgcctctggtctgactggatcaatgaggaccaccccagcagtggcagcgacgacggtgaccgagaaccatttgatggggtctgcggggcccctgaggacatcgagtgcaggtcggtcaaggatccccacctcagcttggagcagcatggccagaaggtgcagtgtgatgtctctgttgggttcatttgcaagaatgaagaccagtttggaaatggaccatttggactgtgttacgactacaagatacgtgtcaattgttgctggcccatggataagtgtatcaccactcccagccctccaactaccactcccagccctccaccaaccacgacgaccacccttccaccaaccaccacccccagccctccaaccaccaccacaaccacccctccaccaaccaccacccccagccctccaataaccaccacgaccacccctctaccaaccaccactcccagccctccaataagcaccacaaccacccctccaccaaccaccactcccagccctccaaccaccactcccagccctccaaccaccactcccagccctccaacaaccaccacaaccacccctccaccaaccaccactcccagccctccaatgactacgcccatcactccaccagccagcactaccacccttccaccaaccaccactcccagccctccaacaaccaccacaaccacccctccaccaaccaccactcccagtcctccaacgactacgcccatcactccaccaaccagcactactacccttccaccaaccaccactcccagccctccaccaaccaccacaaccacccctccaccaaccaccactcccagccctccaacaaccaccactcccagtcctccaacaatcaccacaaccacccctccaccaaccaccactcccagccctccaacaacgaccacaaccacccctccaccaaccaccactcccagccctccaacgactacacccatcactccaccaaccagcactaccacccttccaccaaccaccactcccagccctccaccaaccaccacaaccacccctccaccaaccaccactcccagccctccaacaaccaccactcccagccctccaataaccaccacaaccacccctccaccaaccaccactcccagctctccaataaccaccactcccagccctccaacaaccaccatgaccaccccttcaccaaccaccacccccagctctccaataaccaccacaaccaccccttcctcaactaccactcccagccctccaccaaccaccatgaccaccccttcaccaaccaccactcccagccctccaacaaccaccatgaccacccttccaccaaccaccacttccagccctctaacaactactcctctacctccatcaataactcctcctacattttcaccattctcaacgacaacccctactaccccatgcgtgcctctctgcaattggactggctggctggattctggaaaacccaactttcacaaaccaggtggagacacagaattgattggagacgtctgtggaccaggctgggcagctaacatctcttgcagagccaccatgtatcctgatgttcccattggacagcttggacaaacagtggtgtgtgatgtctctgtggggctgatatgcaaaaatgaagaccaaaagccaggtggggtcatccctatggccttctgcctcaactacgagatcaacgttcagtgctgtgagtgtgtcacccaacccaccaccatgacaaccaccaccacagagaacccaactccgccaaccacgacacccatcaccaccaccactacggtgaccccaaccccaacacccaccggcacacagaccccaaccacgacacccatcaccaccaccactacggtgaccccaaccccaacacccaccggcacacagaccccaaccacgacacccatcaccaccaccactacggtgaccccaaccccaacacccaccggcacacagaccccaaccacgacacccatcaccaccaccactacggtgaccccaaccccaacacccaccggcacacagaccccaaccacgacacccatcaccaccaccactacggtgaccccaaccccaacacccaccggcacacagaccccaaccacgacacccatcaccaccaccactacggtgaccccaaccccaacacccaccggcacacagaccccaaccacgacacccatcaccaccaccactacggtgaccccaaccccaacacccaccggcacacagaccccaaccacgacacccatcaccaccaccactacggtgaccccaaccccaacacccaccggcacacagaccccaaccacgacacccatcaccaccaccactacggtgaccccaaccccaacacccaccggcacacagaccccaaccacgacacccatcaccaccaccactacggtgaccccaaccccaacacccaccggcacacagaccccaaccacgacacccatcaccaccaccactacggtgaccccaaccccaacacccaccggcacacagaccccaaccacgacacccatcaccaccaccactacggtgaccccaaccccaacacccaccggcacacagaccccaaccacgacacccatcaccaccaccactacggtgaccccaaccccaacacccaccggcacacagaccccaaccacgacacccatcaccaccaccactacggtgaccccaaccccaacacccaccggcacacagaccccaaccacgacacccatcaccaccaccactacggtgaccccaaccccaacacccaccggcacacagaccccaaccacgacacccatcaccaccaccactacggtgaccccaaccccaacacccaccggcacacagaccccaaccacgacacccatcaccaccaccactacggtgaccccaaccccaacacccaccggcacacagaccccaaccacgacacccatcaccaccaccactacggtgaccccaaccccaacacccaccggcacacagaccccaaccacgacacccatcaccaccaccactacggtgaccccaaccccaacacccaccggcacacagaccccaaccacgacacccatcaccaccaccactacggtgaccccaaccccaacacccaccggcacacagaccccaaccacgacacccatcaccaccaccactacggtgaccccaaccccaacacccaccggcacacagaccccaaccacgacacccatcaccaccaccactacggtgaccccaaccccaacacccaccggcacacagaccccaaccacgacacccatcaccaccaccactacggtgaccccaaccccaacacccaccggcacacagaccccaaccacgacacccatcaccaccaccactacggtgaccccaaccccaacacccaccggcacacagaccccaaccacgacacccatcaccaccaccactacggtgaccccaaccccaacacccaccggcacacagaccccaaccacgacacccatcaccaccaccactacggtgaccccaaccccaacacccaccggcacacagaccccaaccacgacacccatcaccaccaccactacggtgaccccaaccccaacacccaccggcacacagaccccaaccacgacacccatcaccaccaccactacggtgaccccaaccccaacacccaccggcacacagaccccaaccacgacacccatcaccaccaccactacggtgaccccaaccccaacacccaccggcacacagaccccaaccacgacacccatcaccaccaccactacggtgaccccaaccccaacacccaccggcacacagaccccaaccacgacacccatcaccaccaccactacggtgaccccaaccccaacacccaccggcacacagaccccaaccacgacacccatcaccaccaccactacggtgaccccaaccccaacacccaccggcacacagaccccaaccacgacacccatcaccaccaccactacggtgaccccaaccccaacacccaccggcacacagaccccaaccacgacacccatcaccaccaccactacggtgaccccaaccccaacacccaccggcacacagaccccaaccacgacacccatcaccaccaccactacggtgaccccaaccccaacacccaccggcacacagaccccaaccacgacacccatcaccaccaccactacggtgaccccaaccccaacacccaccggcacacagaccccaaccacgacacccatcaccaccaccactacggtgaccccaaccccaacacccaccggcacacagaccccaaccacgacacccatcaccaccaccactacggtgaccccaaccccaacacccaccggcacacagaccccaaccacgacacccatcaccaccaccactacggtgaccccaaccccaacacccaccggcacacagaccccaaccacgacacccatcaccaccaccactacggtgaccccaaccccaacacccaccggcacacagaccccaaccacgacacccatcaccaccaccactacggtgaccccaaccccaacacccaccggcacacagaccccaaccacgacacccatcaccaccaccactacggtgaccccaaccccaacacccaccggcacacagaccccaaccacgacacccatcaccaccaccactacggtgaccccaaccccaacacccaccggcacacagaccccaaccacgacacccatcaccaccaccactacggtgaccccaaccccaacacccaccggcacacagaccccaaccacgacacccatcaccaccaccactacggtgaccccaaccccaacacccaccggcacacagaccccaaccacgacacccatcaccaccaccactacggtgaccccaaccccaacacccaccggcacacagaccccaaccacgacacccatcaccaccaccactacggtgaccccaaccccaacacccaccggcacacagaccccaaccacgacacccatcaccaccaccactacggtgaccccaaccccaacacccaccggcacacagaccccaaccacgacacccatcaccaccaccactacggtgaccccaaccccaacacccaccggcacacagaccccaaccacgacacccatcaccaccaccactacggtgaccccaaccccaacacccaccggcacacagaccccaaccacgacacccatcaccaccaccactacggtgaccccaaccccaacacccaccggcacacagaccccaaccacgacacccatcaccaccaccactacggtgaccccaaccccaacacccaccggcacacagaccccaaccacgacacccatcaccaccaccactacggtgaccccaaccccaacacccaccggcacacagaccccaaccacgacacccatcaccaccaccactacggtgaccccaaccccaacacccaccggcacacagaccccaaccacgacacccatcaccaccaccactacggtgaccccaaccccaacacccaccggcacacagaccccaaccacgacacccatcaccaccaccactacggtgaccccaaccccaacacccaccggcacacagaccccaaccacgacacccatcaccaccaccactacggtgaccccaaccccaacacccaccggcacacagaccccaaccacgacacccatcaccaccaccactacggtgaccccaaccccaacacccaccggcacacagaccccaaccacgacacccatcaccaccaccactacggtgaccccaaccccaacacccaccggcacacagaccccaaccacgacacccatcaccaccaccactacggtgaccccaaccccaacacccaccggcacacagaccccaaccacgacacccatcaccaccaccactacggtgaccccaaccccaacacccaccggcacacagaccccaaccacgacacccatcaccaccaccactacggtgaccccaaccccaacacccaccggcacacagaccccaaccacgacacccatcaccaccaccactacggtgaccccaaccccaacacccaccggcacacagaccccaaccacgacacccatcaccaccaccactacggtgaccccaaccccaacacccaccggcacacagaccccaaccacgacacccatcaccaccaccactacggtgaccccaaccccaacacccaccggcacacagaccccaaccacgacacccatcaccaccaccactacggtgaccccaaccccaacacccaccggcacacagaccccaaccacgacacccatcaccaccaccactacggtgaccccaaccccaacacccaccggcacacagaccccaaccacgacacccatcaccaccaccactacggtgaccccaaccccaacacccaccggcacacagaccccaaccacgacacccatcaccaccaccactacggtgaccccaaccccaacacccaccggcacacagaccccaaccacgacacccatcaccaccaccactacggtgaccccaaccccaacacccaccggcacacagaccccaaccacgacacccatcaccaccaccactacggtgaccccaaccccaacacccaccggcacacagaccccaaccacgacacccatcaccaccaccactacggtgaccccaaccccaacacccaccggcacacagaccccaaccacgacacccatcaccaccaccactacggtgaccccaaccccaacacccaccggcacacagaccccaaccacgacacccatcaccaccaccactacggtgaccccaaccccaacacccaccggcacacagaccccaaccacgacacccatcaccaccaccactacggtgaccccaaccccaacacccaccggcacacagaccccaaccacgacacccatcaccaccaccactacggtgaccccaaccccaacacccaccggcacacagaccccaaccacgacacccatcaccaccaccactacggtgaccccaaccccaacacccaccggcacacagaccccaaccacgacacccatcaccaccaccactacggtgaccccaaccccaacacccaccggcacacagaccccaaccacgacacccatcaccaccaccactacggtgaccccaaccccaacacccaccggcacacagaccccaaccacgacacccatcaccaccaccactacggtgaccccaaccccaacacccaccggcacacagaccccaaccacgacacccatcaccaccaccactacggtgaccccaaccccaacacccaccggcacacagaccccaaccacgacacccatcaccaccaccactacggtgaccccaaccccaacacccaccggcacacagaccccaaccacgacacccatcaccaccaccactacggtgaccccaaccccaacacccaccggcacacagaccccaaccacgacacccatcaccaccaccactacggtgaccccaaccccaacacccaccggcacacagaccccaaccacgacacccatcaccaccaccactacggtgaccccaaccccaacacccaccggcacacagaccccaaccacgacacccatcaccaccaccactacggtgaccccaaccccaacacccaccggcacacagaccccaaccacgacacccatcaccaccaccactacggtgaccccaaccccaacacccaccggcacacagaccccaaccacgacacccatcaccaccaccactacggtgaccccaaccccaacacccaccggcacacagaccccaaccacgacacccatcaccaccaccactacggtgaccccaaccccaacacccaccggcacacagaccccaaccacgacacccatcaccaccaccactacggtgaccccaaccccaacacccaccggcacacagaccccaaccacgacacccatcaccaccaccactacggtgaccccaaccccaacacccaccggcacacagaccccaaccacgacacccatcaccaccaccactacggtgaccccaaccccaacacccaccggcacacagaccccaaccacgacacccatcaccaccaccactacggtgaccccaaccccaacacccaccggcacacagaccccaaccacgacacccatcaccaccaccactacggtgaccccaaccccaacacccaccggcacacagaccccaaccacgacacccatcaccaccaccactacggtgaccccaaccccaacacccaccggcacacagaccccaaccacgacacccatcaccaccaccactacggtgaccccaaccccaacacccaccggcacacagaccccaaccacgacacccatcaccaccaccactacggtgaccccaaccccaacacccaccggcacacagaccccaaccacgacacccatcaccaccaccactacggtgaccccaaccccaacacccaccggcacacagaccccaaccacgacacccatcaccaccaccactacggtgaccccaaccccaacacccaccggcacacagaccccaaccacgacacccatcaccaccaccactacggtgaccccaaccccaacacccaccggcacacagaccgggccccccacccacacaagcacagcaccgattgctgagttgaccacatccaatcctccgcctgagtcctcaacccctcagacctctcggtccacctcttcccctctcacggagtcaaccacccttctgagtaccctaccacctgccattgagatgaccagcacggccccaccctccacacccacggcacccacgaccacgagcggaggccacacactgtctccaccgcccagcaccaccacgtcccctccaggcacccccactcgcggtaccacgaccgggtcatcttcagcccccacccccagcactgtgcagacgaccaccaccagtgcctggaccccaacgccgaccccactctccacacccagcatcatcaggaccacaggcctgaggccctacccttcctctgtgcttatctgctgtgtcctgaacgacacctactacgcaccaggtgaggaggtgtacaacggcacatacggagacacctgttatttcgtcaactgctcactgagctgtacgttggagttctataactggtcctgcccatccacgccctccccaacacccacgccctccaagtcgacgcccacgccttccaagccatcgtccacgccctccaagccgacgcccggcaccaagccccccgagtgcccagactttgatcctcccagacaggagaacgagacttggtggctgtgcgactgcttcatggccacgtgcaagtacaacaacacggtggagatcgtgaaggtggagtgtgagccgccgcccatgcccacctgctccaacggcctccaacccgtgcgcgtcgaggaccccgacggctgctgctggcactgggagtgcgactgctactgcacgggctggggcgacccgcactatgtcaccttcgacggactctactacagctaccagggcaactgcacctacgtgctggtggaggagatcagcccctccgtggacaacttcggagtttacatcgacaactaccactgcgatcccaacgacaaggtgtcctgtccccgcaccctcatcgtgcgccacgagacccaggaggtgctgatcaagaccgtgcatatgatgcccatgcaggtgcaggtgcaggtgaacaggcaggcggtggcactgccctacaagaagtacgggctggaggtgtaccagtctggcatcaactacgtggtggacatccccgagctgggtgtcctcgtctcctacaatggcctgtccttctccgtcaggctgccctaccaccggtttggcaacaacaccaagggccagtgtggcacctgcaccaacaccacctccgacgactgcattctgcccagcggggagatcgtctccaactgtgaggctgcggctgaccagtggctggtgaacgacccctccaagccacactgcccccacagcagctccacgaccaagcgcccggccgtcactgtgcccgggggcggtaaaacgaccccacacaaggactgcaccccatctcccctctgccagctcatcaaggacagcctgtttgcccagtgccacgcactggtgcccccgcagcactactacgatgcctgcgtgttcgacagctgcttcatgccgggctcgagcctggagtgcgccagtctgcaggcctacgcagccctctgtgcccagcagaacatctgcctcgactggcggaaccacacgcatggggcctgcttggtggagtgcccatctcacagggagtaccaggcctgtggccctgcagaagagcccacgtgcaaatccagctcctcccagcagaacaacacagtcctggtggaaggctgcttctgtcctgagggcaccatgaactacgctcctggctttgatgtctgcgtgaagacctgcggctgtgtgggacctgacaatgtgcccagagagtttggggagcacttcgagttcgactgcaagaactgtgtctgcctggagggtggaagtggcatcatctgccaacccaagaggtgcagccagaagcccgttacccactgcgtggaagacggcacctacctcgccacggaggtcaaccctgccgacacctgctgcaacattaccgtctgcaagtgcaacaccagcctgtgcaaagagaagccctccgtgtgcccgctgggattcgaagtgaagagcaagatggtgcctggaaggtgctgtcccttctactggtgtgagtccaagggggtgtgtgttcacgggaatgctgagtaccagcccggttctccagtttattcctccaagtgccaggactgcgtgtgcacggacaaggtggacaacaacaccctgctcaacgtcatcgcctgcacccacgtgccctgcaacacctcctgcagccctggcttcgaactcatggaggcccccggggagtgctgtaagaagtgtgaacagacgcactgtatcatcaaacggcccgacaaccagcacgtcatcctgaagcccggggacttcaagagcgacccgaagaacaactgcacattcttcagctgcgtgaagatccacaaccagctcatctcgtccgtctccaacatcacctgccccaactttgatgccagcatttgcatcccgggctccatcacattcatgcccaatggatgctgcaagacctgcacccctcgcaatgagaccagggtgccctgctccaccgtccccgtcaccacggaggtttcgtacgccggctgcaccaagaccgtcctcatgaatcattgctccgggtcctgcgggacatttgtcatgtactcggccaaggcccaggccctggaccacagctgctcctgctgcaaagaggagaaaaccagccagcgtgaggtggtcctgagctgccccaatggcggctcgctgacacacacctacacccacatcgagagctgccagtgccaggacaccgtctgcgggctccccaccggcacctcccgccgggcccggcgctcccctaggcatctggggagcgggtgagcggggtgggcacagcccccttcactgccctcgacagctttacctcccccggaccctctgagcctcctaagctcggcttcctctcttcagatatttattgtctgagtctttgttcagtccttgctttccaataataaactcagggggacatgc

SEQ ID NO: 1059 - protein, 440 aa, Homo sapiens [sequence omitted]

SEQ ID NO: 1060 - protein, 230 aa, Homo sapiens
MNEMYLRCDHENQYAQWMAACMLASKGKTMADSSYQPEVLNILSFLRMKNRNSASQVASSLENMDMNPECFVSPRCAKRHKSKQLAARILEAHQNVAQMPLVEAKLRFIQAWQSLPEFGLTYYLVRFKGSKKDDILGVSYNRLIKIDAATGIPVTTWRFTNIKQWNVNWETRQVVIEFDQNVFTAFTCLSADCKIVHEYIGGYIFLSTRSKDQNETLDEDLFHKLTGGQD

SEQ ID NO: 1061 - protein, 311 aa, Homo sapiens
MYVSYLLDKDVSMYPSSVRHSGGLNLAPQNFVSPPQYPDYGGYHVAAAAAAQNLDSAQSPGPSWPAAYGAPLREDWNGYAPGGAAAANAVAHALNGGSPAAAMGYSSPADYHPHHHPHHHPHHPAAAPSCASGLLQTLNPGPPGPAATAAAEQLSPGGQRRNLCEWMRKPAQQSLGSQVKTRTKDKYRVVYTDHQRLELEKEFHYSRYITIRRKAELAATLGLSERQVKIWFQNRRAKERKINKKKLQQQQQQQPPQPPPPPPQPPQPQPGPLRSVPEPLSPVSSLQASVSGSVPGVLGPTGGVLNPTVTQ

SEQ ID NO: 1062 - protein, 237 aa, Homo sapiens
MAGVSACIKYSMFTFNFLFWLCGILILALAIWVRVSNDSQAIFGSEDVGSSSYVAVDILIAVGAIIMILGFLGCCGAIKESRCMLLLFFIGLLLILLLQVATGILGAVFKSKSDRIVNETLYENTKLLSATGESEKQFQEAIIVFQEEFKCCGLVNGAADWGNNFQHYPELCACLDKQRPCQSYNGKQVYKETCISFIKDFLAKNLIIVIGISFGLAVIEILGLVFSMVLYCQIGNK

SEQ ID NO: 1063 - protein, 80 aa, Homo sapiens
MAARALCMLGLVLALLSSSSAEEYVGLSANQCAVPAKDRVDCGYPHVTPKECNNRGCCFDSRIPGVPWCFKPLQEAECTF

SEQ ID NO: 1064 - protein, 323 aa, Homo sapiens
MAYVPAPGYQPTYNPTLPYYQPIPGGLNVGMSVYIQGVASEHMKRFFVNFVVGQDPGSDVAFHFNPRFDGWDKVVFNTLQGGKWGSEERKRSMPFKKGAAFELVFIVLAEHYKVVVNGNPFYEYGHRLPLQMVTHLQVDGDLQLQSINFIGGQPLRPQGPPMMPPYPGPGHCHQQLNSLPTMEGPPTFNPPVPYFGRLQGGLTARRTIIIKGYVPPTGKSFAINFKVGSSGDIALHINPRMGNGTVVRNSLLNGSWGSEEKKITHNPFGPGQFFDLSIRCGLDRFKVYANGQHLFDFAHRLSAFQRVDTLEIQGDVTLSYVQI

SEQ ID NO: 1065 - protein, 957 aa, Homo sapiens
RNRPHTTAFPGSTTMPGVSQESTASHSSPGSTDTTLSPGSTTASSLGPESTTFHSGPGSTETTLLPDNTTASGLLEASTPVHSSTGSPHTTLSPAGSTTRQGESTTFQSWPNSKDTTPAPPTTTSAFVELSTTSHGSPSSTPTTHFSASSTTLGRSEESTTVHSSPVATATTPSPARSTTSGLVEESTTYHSSPGSTQTMHFPESDTTSGRGEESTTSHSSTTHTISSAPSTTSALVEEPTSYHSSPGSTATTHFPDSSTTSGRSEESTASHSNQDATGTIVLPARSTTSVLLGESTTSPISSGSMETTALPGSTTTPGLSEKSTTFHSSPRSPATTLSPASTTSSGVSEESTTSHSRPGSTHTTAFPDSTTTPGLSRHSTTSHSSPGSTDTTLLPASTTTSGPSQESTTSHSSPGSTDTALSPGSTTALSFGQESTTFHSSPGSTHTTLFPDSTTSSGIVEASTRVHSSTGSPRTTLSPASSTSPGLQGESTAFQTHPASTHTTPSTPSTATAPVEESTTYHRSPSSTPTTHFPASSTTSGHSEKSTIFHSSPDASGTTPSSAHSTTSGRGESTTSRISPGSTEITTLPGSTTTPGLSEASTTFYSSPRSPTTTLSPASMTSLGVGEESTTSRSQPGSTHSTVSPASTTTPGLSEESTTVYSSSPGSTETTVFPRSTTTSVRGEEPTTFHSRPASTHTTLFTEDSTTSGLTEESTAFPGSPASTQTGLPATLTTADLGEESTTFPSSSGSTGTTLSPARSTTSGLVGESTPSRLSPSSTETTTLPGSPTTPSLSEKSTTFYTSPRSPDATLSPATTTSSGVSEESSTSHSQPGSTHTTAFPDSTTTSGLSQEPKTSHSSQGSTEATLSPGSTTASSLGQQSTTFHSSPGDTETTLLPDDTITSGLVEASTPTHSSTGSLHTTLTPASSTSAGLQEESTTFQSWPSSSDTTPSPPGP

SEQ ID NO: 1066 - protein, 914 aa, Homo sapiens
MGPFKSSVFILILHLLEGALSNSLIQLNNNGYEGIVVAIDPNVPEDETLIQQIKDMVTQASLYLFEATGKRFYFKNVAILIPETWKTKADYVRPKLETYKNADVLVAESTPPGNDEPYTEQMGNCGEKGERIHLTPDFIAGKKLAEYGPQGKAFVHEWAHLRWGVFDEYNNDEKFYLSNGRIQAVRCSAGITGTNVVKKCQGGSCYTKRCTFNKVTGLYEKGCEFVLQSRQTEKASIMFAQHVDSIVEFCTEQNHNKEAPNKQNQKCNLRSTWEVIRDSEDFKKTTPMTTQPPNPTFSLLQIGQRIVCLVLDKSGSMATGNRLNRLNQAGQLFLLQTVELGSWVGMVTFDSAAHVQSELIQINSGSDRDTLAKRLPAAASGGTSICSGLRSAFTVIRKKYPTDGSEIVLLTDGEDNTISGCFNEVKQSGAIIHTVALGPSAAQELEELSKMTGGLQTYASDQVQNNGLIDAFGALSSGNGAVSQRSIQLESKGLTLQNSQWMNGTVIVDSTVGKDTLFLITWTTQPPQILLWDPSGQKQGGFVVDKNTKMAYLQIPGIAKVGTWKYSLQASSQTLTLTVTSRASNATLPPITVTSKTNKDTSKFPSPLVVYANIRQGASPILRASVTALIESVNGKTVTLELLDNGAGADATKDDGVYSRYFTTYDTNGRYSVKVRALGGVNAARRRVIPQQSGALYIPGWIENDEIQWNPPRPEINKDDVQHKQVCFSRTSSGGSFVASDVPNAPIPDLFPPGQITDLKAEIHGGSLINLTWTAPGDDYDHGTAHKYIIRISTSILDLRDKFNESLQVNTTALIPKEANSEEVFLFKPENITFENGTDLFIAIQAVDKVDLKSEISNIARVSLFIPPQTPPETPSPDETSAPCPNIHINSTIPGIHILKIMWKWIGELQLSIA

SEQ ID NO: 1067 - protein, 585 aa, Homo sapiens
TLSPASMRSSSISGEPTSLYSQAESTHTTAFPASTTTSGLSQESTTFHSKPGSTETTLSPGSITTSSFAQEFTTPHSQPGSALSTVSPASTTVPGLSEESTTFYSSPGSTETTAFSHSNTMSIHSQQSTPFPDSPGFTHTVLPATLTTTDIGQESTAFHSSSDATGTTPLPARSTASDLVGEPTTFYISPSPTYTTLFPASSSTSGLTEESTTFHTSPSFTSTIVSTESLETLAPGLCQEGQIWNGKQCVCPQGYVGYQCLSPLESFPVETPEKLNATLGMTVKVTYRNFTEKMNDASSQEYQNFSTLFKNRMDVVLKGDNLPQYRGVNIRRLLNGSIVVKNDVILEADYTLEYEELFENLAEIVKAKIMNETRTTLLDPDSCRKAILCYSEEDTFVDSSVTPGFDFQEQCTQKAAEGYTQFYYVDVLDGKLACVNKCTKGTKSQMNCNLGTCQLQRSGPRCLCPNTNTHWYWGETCEFNIAKSLVYGIVGAVMAVLLLALIILIILFSLSQRKRHREQYDVPQEWRKEGTPGIFQKTAIWEDQNLRESRFGLENAYNNFRPTLETVDSGTELHIQRPEMVASTV

SEQ ID NO: 1068 - protein, 5179 aa, Homo sapiens
MGLPLARLAAVCLALSLAGGSELQTEGRTRYHGRNVCSTWGNFHYKTFDGDVFRFPGLCDYNFASDCRGSYKEFAVHLKRGPGQAEAPAGVESILLTIKDDTIYLTRHLAVLNGAVVSTPHYSPGLLIEKSDAYTKVYSRAGLTLMWNREDALMLELDTKFRNHTCGLCGDYNGLQSYSEFLSDGVLFSPLEFGNMQKINQPDVVCEDPEEEVAPASCSEHRAECERLLTAEAFADCQDLVPLEPYLRACQQDRCRCPGGDTCVCSTVAEFSRQCSHAGGRPGNWRTATLCPKTCPGNLVYLESGSPCMDTCSHLEVSSLCEEHRMDGCFCPEGTVYDDIGDSGCVPVSQCHCRLHGHLYTPGQEITNDCEQCVCNAGRWVCKDLPCPGTCALEGGSHITTFDGKTYTFHGDCYYVLAKGDHNDSYALLGELAPCGSTDKQTCLKTVVLLADKKKNAVVFKSDGSVLLNQLQVNLPHVTASFSVFRPSSYHIMVSMAIGVRLQVQLAPVMQLFVTLDQASQGQVQGLCGNFNGLEGDDFKTASGLVEATGAGFANTWKAQSTCHDKLDWLDDPCSLNIESANYAEHWCSLLKKTETPFGRCHSAVDPAEYYKRCKYDTCNCQNNEDCLCAALSSYARACTAKGVMLWGWREHVCNKDVGSCPNSQVFLYNLTTCQQTCRSLSEADSHCLEGFAPVDGCGCPDHTFLDEKGRCVPLAKCSCYHRGLYLEAGDVVVRQEERCVCRDGRLHCRQIRLIGQSCTAPKIHMDCSNLTALATSKPRALSCQTLAAGYYHTECVSGCVCPDGLMDDGRGGCVVEKECPCVHNNDLYSSGAKIKVDCNTCTCKRGRWVCTQAVCHGTCSIYGSGHYITFDGKYYDFDGHCSYVAVQDYCGQNSSLGSFSIITENVPCGTTGVTCSKAIKIFMGRTELKLEDKHRVVIQRDEGHHVAYTTREVGQYLVVESSTGIIVIWDKRTTVFIKLAPSYKGTVCGLCGNFDHRSNNDFTTRDHMVVSSELDFGNSWKEAPTCPDVSTNPEPCSLNPHRRSWAEKQCSILKSSVFSICHSKVDPKPFYEACVHDSCSCDTGGDCECFCSAVASYAQECTKEGACVFWRTPDLCPIFCDYYNPPHECEWHYEPCGNRSFETCRTINGIHSNISVSYLEGCYPRCPKDRPIYEEDLKKCVTADKCGCYVEDTHYPPGASVPTEETCKSCVCTNSSQVVCRPEEGKILNQTQDGAFCYWEICGPNGTVEKHFNICSITTRPSTLTTFTTITLPTTPTSFTTTTTTTTPTSSTVLSTTPKLCCLWSDWINEDHPSSGSDDGDREPFDGVCGAPEDIECRSVKDPHLSLEQHGQKVQCDVSVGFICKNEDQFGNGPFGLCYDYKIRVNCCWPMDKCITTPSPPTTTPSPPPTTTTTLPPTTTPSPPTTTTTTPPPTTTPSPPITTTTTPLPTTTPSPPISTTTTPPPTTTPSPPTTTPSPPTTTPSPPTTTTTTPPPTTTPSPPMTTPITPPASTTTLPPTTTPSPPTTTTTTPPPTTTPSPPTTTPITPPTSTTTLPPTTTPSPPPTTTTTPPPTTTPSPPTTTTPSPPTITTTTPPPTTTPSPPTTTTTTPPPTTTPSPPTTTPITPPTSTTTLPPTTTPSPPPTTTTTPPPTTTPSPPTTTTPSPPITTTTTPPPTTTPSSPITTTPSPPTTTMTTPSPTTTPSSPITTTTTPSSTTTPSPPPTTMTTPSPTTTPSPPTTTMTTLPPTTTSSPLTTTPLPPSITPPTFSPFSTTTPTTPCVPLCNWTGWLDSGKPNFHKPGGDTELIGDVCGPGWAANISCRATMYPDVPIGQLGQTVVCDVSVGLICKNEDQKPGGVIPMAFCLNYEINVQCCECVTQPTTMTTTTTENPTPPTTTPITTTTTVTPTPTPTGTQTPTTTPITTTTTVTPTPTPTGTQTPTTTPITTTTTVTPTPTPTGTQTPTTTPITTTTTVTPTPTPTGTQTPTTTPITTTTTVTPTPTPTGTQTPTTTPITTTTTVTPTPTPTGTQTPTTTPITTTTTVTPTPTPTGTQTPTTTPITTTTTVTPTPTPTGTQTPTTTPITTTTTVTPTPTPTGTQTPTTTPITTTTTVTPTPTPTGTQTPTTTPITTTTTVTPTPTPTGTQTPTTTPITTTTTVTPTPTPTGTQTPTTTPITTTTTVTPTPTPTGTQTPTTTPITTTTTVTPTPTPTGTQTPTTTPITTTTTVTPTPTPTGTQTPTTTPITTTTTVTPTPTPTGTQTPTTTPITTTTTVTPTPTPTGTQTPTTTPITTTTTVTPTPTPTGTQTPTTTPITTTTTVTPTPTPTGTQTPTTTPITTTTTVTPTPTPTGTQTPTTTPITTTTTVTPTPTPTGTQTPTTTPITTTTTVTPTPTPTGTQTPTTTPITTTTTVTPTPTPTGTQTPTTTPITTTTTVTPTPTPTGTQTPTTTPITTTTTVTPTPTPTGTQTPTTTPITTTTTVTPTPTPTGTQTPTTTPITTTTTVTPTPTPTGTQTPTTTPITTTTTVTPTPTPTGTQTPTTTPITTTTTVTPTPTPTGTQTPTTTPITTTTTVTPTPTPTGTQTPTTTPITTTTTVTPTPTPTGTQTPTTTPITTTTTVTPTPTPTGTQTPTTTPITTTTTVTPTPTPTGTQTPTTTPITTTTTVTPTPTPTGTQTPTTTPITTTTTVTPTPTPTGTQTPTTTPITTTTTVTPTPTPTGTQTPTTTPITTTTTVTPTPTPTGTQTPTTTPITTTTTVTPTPTPTGTQTPTTTPITTTTTVTPTPTPTGTQTPTTTPITTTTTVTPTPTPTGTQTPTTTPITTTTTVTPTPTPTGTQTPTTTPITTTTTVTPTPTPTGTQTPTTTPITTTTTVTPTPTPTGTQTPTTTPITTTTTVTPTPTPTGTQTPTTTPITTTTTVTPTPTPTGTQTPTTTPITTTTTVTPTPTPTGTQTPTTTPITTTTTVTPTPTPTGTQTPTTTPITTTTTVTPTPTPTGTQTPTTTPITTTTTVTPTPTPTGTQTPTTTPITTTTTVTPTPTPTGTQTPTTTPITTTTTVTPTPTPTGTQTPTTTPITTTTTVTPTPTPTGTQTPTTTPITTTTTVTPTPTPTGTQTPTTTPITTTTTVTPTPTPTGTQTPTTTPITTTTTVTPTPTPTGTQTPTTTPITTTTTVTPTPTPTGTQTPTTTPITTTTTVTPTPTPTGTQTPTTTPITTTTTVTPTPTPTGTQTPTTTPITTTTTVTPTPTPTGTQTPTTTPITTTTTVTPTPTPTGTQTPTTTPITTTTTVTPTPTPTGTQTPTTTPITTTTTVTPTPTPTGTQTPTTTPITTTTTVTPTPTPTGTQTPTTTPITTTTTVTPTPTPTGTQTPTTTPITTTTTVTPTPTPTGTQTPTTTPITTTTTVTPTPTPTGTQTPTTTPITTTTTVTPTPTPTGTQTPTTTPITTTTTVTPTPTPTGTQTPTTTPITTTTTVTPTPTPTGTQTPTTTPITTTTTVTPTPTPTGTQTPTTTPITTTTTVTPTPTPTGTQTPTTTPITTTTTVTPTPTPTGTQTPTTTPITTTTTVTPTPTPTGTQTPTTTPITTTTTVTPTPTPTGTQTPTTTPITTTTTVTPTPTPTGTQTPTTTPITTTTTVTPTPTPTGTQTPTTTPITTTTTVTPTPTPTGTQTPTTTPITTTTTVTPTPTPTGTQTPTTTPITTTTTVTPTPTPTGTQTPTTTPITTTTTVTPTPTPTGTQTPTTTPITTTTTVTPTPTPTGTQTPTTTPITTTTTVTPTPTPTGTQTPTTTPITTTTTVTPTPTPTGTQTPTTTPITTTTTVTPTPTPTGTQTPTTTPITTTTTVTPTPTPTGTQTPTTTPITTTTTVTPTPTPTGTQTPTTTPITTTTTVTPTPTPTGTQTPTTTPITTTTTVTPTPTPTGTQTPTTTPITTTTTVTPTPTPTGTQTPTTTPITTTTTVTPTPTPTGTQTPTTTPITTTTTVTPTPTPTGTQTPTTTPITTTTTVTPTPTPTGTQTPTTTPITTTTTVTPTPTPTGTQTPTTTPITTTTTVTPTPTPTGTQTPTTTPITTTTTVTPTPTPTGTQTPTTTPITTTTTVTPTPTPTGTQTPTTTPITTTTTVTPTPTPTGTQTPTTTPITTTTTVTPTPTPTGTQTPTTTPITTTTTVTPTPTPTGTQTPTTTPITTTTTVTPTPTPTGTQTGPPTHTSTAPIAELTTSNPPPESSTPQTSRSTSSPLTESTTLLSTLPPAIEMTSTAPPSTPTAPTTTSGGHTLSPPPSTTTSPPGTPTRGTTTGSSSAPTPSTVQTTTTSAWTPTPTPLSTPSIIRTTGLRPYPSSVLICCVLNDTYYAPGEEVYNGTYGDTCYFVNCSLSCTLEFYNWSCPSTPSPTPTPSKSTPTPSKPSSTPSKPTPGTKPPECPDFDPPRQENETWWLCDCFMATCKYNNTVEIVKVECEPPPMPTCSNGLQPVRVEDPDGCCWHWECDCYCTGWGDPHYVTFDGLYYSYQGNCTYVLVEEISPSVDNFGVYIDNYHCDPNDKVSCPRTLIVRHETQEVLIKTVHMMPMQVQVQVNRQAVALPYKKYGLEVYQSGINYVVDIPELGVLVSYNGLSFSVRLPYHRFGNNTKGQCGTCTNTTSDDCILPSGEIVSNCEAAADQWLVNDPSKPHCPHSSSTTKRPAVTVPGGGKTTPHKDCTPSPLCQLIKDSLFAQCHALVPPQHYYDACVFDSCFMPGSSLECASLQAYAALCAQQNICLDWRNHTHGACLVECPSHREYQACGPAEEPTCKSSSSQQNNTVLVEGCFCPEGTMNYAPGFDVCVKTCGCVGPDNVPREFGEHFEFDCKNCVCLEGGSGIICQPKRCSQKPVTHCVEDGTYLATEVNPADTCCNITVCKCNTSLCKEKPSVCPLGFEVKSKMVPGRCCPFYWCESKGVCVHGNAEYQPGSPVYSSKCQDCVCTDKVDNNTLLNVIACTHVPCNTSCSPGFELMEAPGECCKKCEQTHCIIKRPDNQHVILKPGDFKSDPKNNCTFFSCVKIHNQLISSVSNITCPNFDASICIPGSITFMPNGCCKTCTPRNETRVPCSTVPVTTEVSYAGCTKTVLMNHCSGSCGTFVMYSAKAQALDHSCSCCKEEKTSQREVVLSCPNGGSLTHTYTHIESCQCQDTVCGLPTGTSRRARRSPRHLGSG

SEQ ID NO: 1069 - DNA, 1173 bp, Homo sapiens
cagccagagacaggggaggagggaagaaggatactgtggaaagggatggcggggcaaacatttagagctagaagccacgactgggaccactggagacactgaagaaggcaggggcccttagagtcttggttgccaaacagatttgcagatcaaggagaacccaggagtttcaaagaagcgctagtaaggtctctgagatccttgcactagctacatcctcagggtaggaggaagatggcttccagaagcatgcggctgctcctattgctgagctgcctggccaaaacaggagtcctgggtgatatcatcatgagacccagctgtgctcctggatggttttaccacaagtccaattgctatggttacttcaggaagctgaggaactggtctgatgccgagctcgagtgtcagtcttacggaaacggagcccacctggcatctatcctgagtttaaaggaagccagcaccatagcagagtacataagtggctatcagagaagccagccgatatggattggcctgcacgacccacagaagaggcagcagtggcagtggattgatggggccatgtatctgtacagatcctggtctggcaagtccatgggtgggaacaagcactgtgctgagatgagctccaataacaactttttaacttggagcagcaacgaatgcaacaagcgccaacacttcctgtgcaagtaccgaccatagagcaagaatcaagattctgctaactcctgcacagccccgtcctcttcctttctgctagcctggctaaatctgctcattatttcagaggggaaacctagcaaactaagagtgataagggccctactacactggcttttttaggcttagagacagaaactttagcattggcccagtagtggcttctagctctaaatgtttgccccgccatccctttccacagtatccttcttccctcctcccctgtctctggctgtctcgagcagtctagaagagtgcatctccagcctatgaaacagctgggtctttggccataagaagtaaagatttgaagacagaaggaagaaactcaggagtaagcttctagcccccttcagcttctacacccttctgccctctctccattgcctgcaccccaccccagccactcaactcctgcttgtttttcctttggccatgggaaag

SEQ ID NO: 1070 - protein, 158 aa, Homo sapiens
MASRSMRLLLLLSCLAKTGVLGDIIMRPSCAPGWFYHKSNCYGYFRKLRNWSDAELECQSYGNGAHLASILSLKEASTIAEYISGYQRSQPIWIGLHDPQKRQQWQWIDGAMYLYRSWSGKSMGGNKHCAEMSSNNNFLTWSSNECNKRQHFLCKYRP

SEQ ID NO: 1071 - DNA, 1114 bp, Homo sapiens
gcacgaggccaaacagatttgcagatcaaggagaacccaggagtttcaaagaagcgctagtaaggtctctgagatccttgcactagctacatcctcagggtaggaggaagatggcttccagaagcatgcggctgctcctattgctgagctgcctggccaaaacaggagtcctgggtgatatcatcatgagacccagctgtgctcctggatggttttaccacaagtccaattgctatggttacttcaggaagctgaggaactggtctgatgccgagctcgagtgtcagtcttacggaaacggagcccacctggcatctatcctgagtttaaaggaagccagcaccatagcagagtacataagtggctatcagagaagccagccgatatggattggcctgcacgacccacagaagaggcagcagtggcagtggattgatggggccatgtatctgtacagatcctggtctggcaagtccatgggtgggaacaagcactgtgctgagatgagctccaataacaactttttaacttggagcagcaacgaatgcaacaagcgccaacacttcctgtgcaagtaccgaccatagagcaagaatcaagattctgctaactcctgcacagccccgtcctcttcctttctgctagcctggctaaatctgctcattatttcagaggggaaacctagcaaactaagagtgataagggccctactacactggcttttttaggcttagagacagaaactttagcattggcccagtagtggcttctagctctaaatgtttgccccgccatccctttccacagtatccttcttccctcctcccctgtctctggctgtctcgagcagtctagaagagtgcatctccagcctatgaaacagctgggtctttggccataagaagtaaagatttgaagacagaaggaagaaactcaggagtaagcttctagaccccttcagcttctacacccttctgccctctctccattgcctgcaccccaccccagccactcaactcctgcttgtttttcctttggccataggaaggtttaccagtagaatccttgctaggttgatgtgggccatacattcctttaataaaccattgtgtac

SEQ ID NO: 1072 - DNA, 1152 bp, Homo sapiens
actggagacactgaagaaggcaggggcccttagagtcttggttgccaaacagatttgcagatcaaggagaacccaggagtttcaaagaagcgctagtaaggtctctgagatccttgcactagctacatcctcagggtaggaggaagatggcttccagaagcatgcggctgctcctattgctgagctgcctggccaaaacaggagtcctgggtgatatcatcatgagacccagctgtgctcctggatggttttaccacaagtccaattgctatggttacttcaggaagctgaggaactggtctgatgccgagctcgagtgtcagtcttacggaaacggagcccacctggcatctatcctgagtttaaaggaagccagcaccatagcagagtacataagtggctatcagagaagccagccgatatggattggcctgcacgacccacagaagaggcagcagtggcagtggattgatggggccatgtatctgtacagatcctggtctggcaagtccatgggtgggaacaagcactgtgctgagatgagctccaataacaactttttaacttggagcagcaacgaatgcaacaagcgccaacacttcctgtgcaagtaccgaccatagagcaagaatcaagattctgctaactcctgcacagccccgtcctcttcctttctgctagcctggctaaatctgctcattatttcagaggggaaacctagcaaactaagagtgataagggccctactacactggcttttttaggcttagagacagaaactttagcattggcccagtagtggcttctagctctaaatgtttgccccgccatccctttccacagtatccttcttccctcctcccctgtctctggctgtctcgagcagtctagaagagtgcatctccagcctatgaaacagctgggtctttggccataagaagtaaagatttgaagacagaaggaagaaactcaggagtaagcttctagcccccttcagcttctacacccttctgccctctctccattgcctgcaccccaccccagccactcaactcctgcttgtttttcctttggccatgggaaggtttaccagtagaatccttgctaggttgatgtgggccatacattcctttaataaaccattgtgtacat

SEQ ID NO: 1073 - DNA, 474 bp, Homo sapiens
atggcttccagaagcatgcggctgctcctattgctgagctgcctggccaaaacaggagtcctgggtgatatcatcatgagacccagctgtgctcctggatggttttaccacaagtccaattgctatggttacttcaggaagctgaggaactggtctgatgccgagctcgagtgtcagtcttacggaaacggagcccacctggcatctatcctgagtttaaaggaagccagcaccatagcagagtacataagtggctatcagagaagccagccgatatggattggcctgcacgacccacagaagaggcagcagtggcagtggattgatggggccatgtatctgtacagatcctggtctggcaagtccatgggtgggaacaagcactgtgctgagatgagctccaataacaactttttaacttggagcagcaacgaatgcaacaagcgccaacacttcctgtgcaagtaccgacca

SEQ ID NO: 1074 - DNA, 1114 bp, Homo sapiens; identical to SEQ ID NO: 1071

SEQ ID NO: 1075 - DNA, 614 bp, Homo sapiens
tgaagaaggcaggggcccttagagtcttggttgccaaacagatttgcagatcaaggagaacccaggagtttcaaagaagcgctagtaaggtctctgagatccttgcactagctacatcctcagggtaggaggaagatggcttccagaagcatgcggctgctcctattgctgagctgcctggccaaaacaggagtcctgggtgatatcatcatgagacccagctgtgctcctggatggttttaccacaagtccaattgctatggttacttcaggaagctgaggaactggtctgatgccgagctcgagtgtcagtcttacggaaacggagcccacctggcatctatcctgagtttaaaggaagccagcaccatagcagagtacataagtggctatcagagaagccagccgatatggattggcctgcacgacccacagaagaggcagcagtggcagtggattgatggggccatgtatctgtacagatcctggtctggcaagtccatgggtgggaacaagcactgtgctgagatgagctccaataacaactttttaacttggagcagcaacgaatgcaacaagcgccaacacttcctgtgcaagtaccgaccatagag

SEQ ID NO: 1076 - DNA, 3345 bp, Homo sapiens
gaattccgtctcgaccactgaatggaagaaaaggacttttaaccaccattttgtgacttacagaaaggaatttgaataaagaaaactatgatacttcaggcccatcttcactccctgtgtcttcttatgctttatttggcaactggatatggccaagaggggaagtttagtggacccctgaaacccatgacattttctatttatgaaggccaagaaccgagtcaaattatattccagtttaaggccaatcctcctgctgtgacttttgaactaactggggagacagacaacatatttgtgatagaacgggagggacttctgtattacaacagagccttggacagggaaacaagatctactcacaatctccaggttgcagccctggacgctaatggaattatagtggagggtccagtccctatcaccatagaagtgaaggacatcaacgacaatcgacccacgtttctccagtcaaagtacgaaggctcagtaaggcagaactctcgcccaggaaagcccttcttgtatgtcaatgccacagacctggatgatccggccactcccaatggccagctttattaccagattgtcatccagcttcccatgatcaacaatgtcatgtactttcagatcaacaacaaaacgggagccatctctcttacccgagagggatctcaggaattgaatcctgctaagaatccttcctataatctggtgatctcagtgaaggacatgggaggccagagtgagaattccttcagtgataccacatctgtggatatcatagtgacagagaatatttggaaagcaccaaaacctgtggagatggtggaaaactcaactgatcctcaccccatcaaaatcactcaggtgcggtggaatgatcccggtgcacaatattccttagttgacaaagagaagctgccaagattcccattttcaattgaccaggaaggagatatttacgtgactcagcccttggaccgagaagaaaaggatgcatatgttttttatgcagttgcaaaggatgagtacggaaaaccactttcatatccgctggaaattcatgtaaaagttaaagatattaatgataatccacctacatgtccgtcaccagtaaccgtatttgaggtccaggagaatgaacgactgggtaacagtatcgggacccttactgcacatgacagggatgaagaaaatactgccaacagttttctaaactacaggattgtggagcaaactcccaaacttcccatggatggactcttcctaatccaaacctatgctggaatgttacagttagctaaacagtccttgaagaagcaagatactcctcagtacaacttaacgatagaggtgtctgacaaagatttcaagaccctttgttttgtgcaaatcaacgttattgatatcaatgatcagatccccatctttgaaaaatcagattatggaaacctgactcttgctgaagacacaaacattgggtccaccatcttaaccatccaggccactgatgctgatgagccatttactgggagttctaaaattctgtatcatatcataaagggagacagtgagggacgcctgggggttgacacagatccccataccaacaccggatatgtcataattaaaaagcctcttgattttgaaacagcagctgtttccaacattgtgttcaaagcagaaaatcctgagcctctagtgtttggtgtgaagtacaatgcaagttcttttgccaagttcacgcttattgtgacagatgtgaatgaagcacctcaattttcccaacacgtattccaagcgaaagtcagtgaggatgtagctataggcactaaagtgggcaatgtgactgccaaggatccagaaggtctggacataagctattcactgaggggagacacaagaggttggcttaaaattgaccacgtgactggtgagatctttagtgtggctccattggacagagaagccggaagtccatatcgggtacaagtggtggccacagaagtaggggggtcttccttaagctctgtgtcagagttccacctgatccttatggatgtgaatgacaaccctcccaggctagccaaggactacacgggcttgttcttctgccatcccctcagtgcacctggaagtctcattttcgaggctactgatgatgatcagcacttatttcggggtccccattttacattttccctcggcagtggaagcttacaaaacgactgggaagtttccaaaatcaatggtactcatgcccgactgtctaccaggcacacagactttgaggagagggcgtatgtcgtcttgatccgcatcaatgatgggggtcggccacccttggaaggcattgtttctttaccagttacattctgcagttgtgtggaaggaagttgtttccggccagcaggtcaccagactgggatacccactgtgggcatggcagttggtatactgctgaccacccttctggtgattggtataattttagcagttgtgtttatccgcataaagaaggataaaggcaaagataatgttgaaagtgctcaagcatctgaagtcaaacctctgagaagctgaatttgaaaaggaatgtttgaatttatatagcaagtgctatttcagcaacaaccatctcatcctattacttttcatctaacgtgcattataattttttaaacagatattccctcttgtcctttaatatttgctaaatatttcttttttgaggtggagtcttgctctgtcgcccaggctggagtacagtggtgtgatcccagctcactgcaacctccgcctcctgggttcacatgattctcctgcctcagcttcctaagtagctgggtttacaggcacccaccaccatgcccagctaatttttgtatttttaatagagacggggtttcgccatttggccaggctggtcttgaactcctgacgtcaagtgatctgcctgccttggtctcccaatacaggcatgaaccactgcacccacctacttagatatttcatgtgctatagacattagagagatttttcatttttccatgacatttttcctctctgcaaatggcttagctacttgtgtttttcccttttggggcaagacagactcattaaatattctgtacattttttctttatcaaggagatatatcagtgttgtctcatagaactgcctggattccatttatgttttttctgattccatcctgtgtccccttcatccttgactcctttggtatttcactgaatttcaaacatttgtcagagaagaaaaaagtgaggactcaggaaaaataaataaataaaagaacagccttttgcggccgcgaattc

SEQ ID NO: 1077 - protein, 158 aa, Homo sapiens; identical to SEQ ID NO: 1070

SEQ ID NO: 1078 - protein, 158 aa, Homo sapiens; identical to SEQ ID NO: 1070

SEQ ID NO: 1079 - protein, 158 aa, Homo sapiens; identical to SEQ ID NO: 1070

SEQ ID NO: 1080 - protein, 158 aa, Homo sapiens; identical to SEQ ID NO: 1070

SEQ ID NO: 1081 - protein, 832 aa, Homo sapiens [sequence omitted]

SEQ ID NO: 1082 - DNA, 265 bp, Homo sapiens
gaaacatggactgccccttaaattttgactgtcctaaaaacctatttctgatttataatatgctgcctgataaagtgacactagatgtaccagctgagtgtttaatcttcccatcacagatcagatttgagcattaacaggtattttcacatacttgacttcaatatgcttaaagtgaggaacaagcaattaagtggggactaaaaatgttggcctttaagcaatttgtcataaatcttcacaataaagaataaatcaatgtttt

SEQ ID NO: 1083 - protein, 44 aa, Homo sapiens
NMDCPLNFDCPKNLFLIYNMLPDKVTLDVPAECLIFPSQIRFEH

SEQ ID NO: 1084 - DNA, 1035 bp, Homo sapiens
atgcatcaccatcaccatcacacggccgcgtccgataacttccagctgtcccagggtgggcagggattcgccattccgatcgggcaggcgatggcgatcgcgggccagatcaagcttcccaccgttcatatcgggcctaccgccttcctcggcttgggtgttgtcgacaacaacggcaacggcgcacgagtccaacgcgtggtcgggagcgctccggcggcaagtctcggcatctccaccggcgacgtgatcaccgcggtcgacggcgctccgatcaactcggccaccgcgatggcggacgcgcttaacgggcatcatcccggtgacgtcatctcggtgacctggcaaaccaagtcgggcggcacgcgtacagggaacgtgacattggccgagggacccccggccgaattcatatgggtacgagtaagcaatgactctcaagcaatttttggttctgaagatgtaggctctagctcctacgttgctgtggacatattgattgctgtaggtgccatcatcatgattctgggcttcctgggatgctgcggtgctataaaagaaagtcgctgcatgcttctgttgtttttcataggcttgcttctgatcctgctcctgcaggtggcgacaggtatcctaggagctgttttcaaatctaagtctgatcgcattgtgaatgaaactctctatgaaaacacaaagcttttgagcgccacaggggaaagtgaaaaacaattccaggaagccataattgtgtttcaagaagagtttaaatgctgcggtttggtcaatggagctgctgattggggaaataattttcaacactatcctgaattatgtgcctgtctagataagcagagaccatgccaaagctataatggaaaacaagtttacaaagagacctgtatttctttcataaaagacttcttggcaaaaaatttgattatagttattggaatatcatttggactggcagttattgagatactgggtttggtgttttctatggtcctgtattgccagatcgggaacaaataa

SEQ ID NO: 1085 - protein, 344 aa, Homo sapiens
MHHHHHHTAASDNFQLSQGGQGFAIPIGQAMAIAGQIKLPTVHIGPTAFLGLGVVDNNGNGARVQRVVGSAPAASLGISTGDVITAVDGAPINSATAMADALNGHHPGDVISVTWQTKSGGTRTGNVTLAEGPPAEFIWVRVSNDSQAIFGSEDVGSSSYVAVDILIAVGAIIMILGFLGCCGAIKESRCMLLLFFIGLLLILLLQVATGILGAVFKSKSDRIVNETLYENTKLLSATGESEKQFQEAIIVFQEEFKCCGLVNGAADWGNNFQHYPELCACLDKQRPCQSYNGKQVYKETCISFIKDFLAKNLIIVIGISFGLAVIEILGLVFSMVLYCQIGNK

SEQ ID NO: 1086 - DNA, 2877 bp, Homo sapiens
atgcatcaccatcaccatcacacggccgcgtccgataacttccagctgtcccagggtgggcagggattcgccattccgatcgggcaggcgatggcgatcgcgggccagatcaagcttcccaccgttcatatcgggcctaccgccttcctcggcttgggtgttgtcgacaacaacggcaacggcgcacgagtccaacgcgtggtcgggagcgctccggcggcaagtctcggcatctccaccggcgacgtgatcaccgcggtcgacggcgctccgatcaactcggccaccgcgatggcggacgcgcttaacgggcatcatcccggtgacgtcatctcggtgacctggcaaaccaagtcgggcggcacgcgtacagggaacgtgacattggccgagggacccccggccgaattctccatggagctcgctagcggatccgcggccgcacaagaggggaagtttagtggacccctgaaacccatgacattttctatttatgaaggccaagaaccgagtcaaattatattccagtttaaggccaatcctcctgctgtgacttttgaactaactggggagacagacaacatatttgtgatagaacgggagggacttctgtattacaacagagccttggacagggaaacaagatctactcacaatctccaggttgcagccctggacgctaatggaattatagtggagggtccagtccctatcaccatagaagtgaaggacatcaacgacaatcgacccacgtttctccagtcaaagtacgaaggctcagtaaggcagaactctcgcccaggaaagcccttcttgtatgtcaatgccacagacctggatgatccggccactcccaatggccagctttattaccagattgtcatccagcttcccatgatcaacaatgtyatgtactttcagatcaacaacaaaacgggagccatctctcttacccgagagggatctcaggaattgaatcctgctaagaatccttcctataatctggtgatctcagtgaaggacatgggaggccagagtgagaattccttcagtgataccacatctgtggatatcatagtgacagagaatatttggaaagcaccaaaacctgtggagatggtggaaaactcaactgatcctcaccccatcaaaatcactcaggtgcggtggaatgatcccggtgcacaatattccttagttgacaaagagaagctgccaagattcccattttcaattgaccaggaaggagatatttacgtgactcagcccttggaccgagaagaaaaggatgcatatgttttttatgcagttgcaaaggatgagtacggaaaaccactttcatatccgctggaaattcatgtaaaagttaaagatattaatgataatccacctacatgtccgtcaccagtaaccgtatttgaggtccaggagaatgaacgactgggtaacagtatcgggacccttactgcacatgacagggatgaagaaaatactgccaacagttttctaaactacaggattgtggagcaaactcccaaacttcccatggatggactcttcctaatccaaacctatgctggaatgttacagttagctaaacagtccttgaagaagcaagatactcctcagtacaacttaacgatagaggtgtctgacaaagatttcaagaccctttgttttgtgcaaatcaacgttattgatatcaatgatcagatccccatctttgaaaaatcagattatggaaacctgactcttgctgaagacacaaacattgggtccaccatcttaaccatccaggccactgatgctgatgagccatttactgggagttctaaaattctgtatcatatcataaagggagacagtgagggacgcctgggggttgacacagatccccataccaacaccggatatgtcataattaaaaagcctcttgattttgaaacagcagctgtttccaacattgtgttcaaagcagaaaatcctgagcctctagtgtttggtgtgaagtacaatgcaagttcttttgccaagttcacgcttattgtgacagatgtgaatgaagcacctcaattttcccaacacgtattccaagcgaaagtcagtgaggatgtagctataggcactaaagtgggcaatgtgactgccaaggatccagaaggtctggacataagctattcactgaggggagacacaagaggttggcttaaaattgaccacgtgactggtgagatctttagtgtggctccattggacagagaagccggaagtccatatcgggtacaagtggtggccacagaagtaggggggtcttccttaagctctgtgtcagagttccacctgatccttatggatgtgaatgacaaccctcccaggctagccaaggactacacgggcttgttcttctgccatcccctcagtgcacctggaagtctcattttcgaggctactgatgatgatcagcacttatttcggggtccccattttacattttccctcggcagtggaagcttacaaaacgactgggaagtttccaaaatcaatggtactcatgcccgactgtctaccaggcacacagactttgaggagagggcgtatgtcgtcttgatccgcatcaatgatgggggtcggccacccttggaaggcattgtttctttaccagttacattctgcagttgtgtggaaggaagttgtttccggccagcaggtcaccagactgggatacccactgtgggcatggcagttggtatactgctgaccacccttctggtgattggtataattttagcagttgtgtttatccgcataaagaaggataaaggcaaagataatgttgaaagtgctcaagcatctgaagtcaaacctctgagaagctga

SEQ ID NO: 1087 - protein, 958 aa, Homo sapiens
MHHHHHHTAASDNFQLSQGGQGFAIPIGQAMAIAGQIKLPTVHIGPTAFLGLGVVDNNGNGARVQRVVGSAPAASLGISTGDVITAVDGAPINSATAMADALNGHHPGDVISVTWQTKSGGTRTGNVTLAEGPPAEFSMELASGSAAAQEGKFSGPLKPMTFSIYEGQEPSQIIFQFKANPPAVTFELTGETDNIFVIEREGLLYYNRALDRETRSTHNLQVAALDANGIIVEGPVPITIEVKDINDNRPTFLQSKYEGSVRQNSRPGKPFLYVNATDLDDPATPNGQLYYQIVIQLPMINNVMYFQINNKTGAISLTREGSQELNPAKNPSYNLVISVKDMGGQSENSFSDTTSVDIIVTENIWKAPKPVEMVENSTDPHPIKITQVRWNDPGAQYSLVDKEKLPRFPFSIDQEGDIYVTQPLDREEKDAYVFYAVAKDEYGKPLSYPLEIHVKVKDINDNPPTCPSPVTVFEVQENERLGNSIGTLTAHDRDEENTANSFLNYRIVEQTPKLPMDGLFLIQTYAGMLQLAKQSLKKQDTPQYNLTIEVSDKDFKTLCFVQINVIDINDQIPIFEKSDYGNLTLAEDTNIGSTILTIQATDADEPFTGSSKILYHIIKGDSEGRLGVDTDPHTNTGYVIIKKPLDFETAAVSNIVFKAENPEPLVFGVKYNASSFAKFTLIVTDVNEAPQFSQHVFQAKVSEDVAIGTKVGNVTAKDPEGLDISYSLRGDTRGWLKIDHVTGEIFSVAPLDREAGSPYRVQVVATEVGGSSLSSVSEFHLILMDVNDNPPRLAKDYTGLFFCHPLSAPGSLIFEATDDDQHLFRGPHFTFSLGSGSLQNDWEVSKINGTHARLSTRHTDFEERAYVVLIRINDGGRPPLEGIVSLPVTFCSCVEGSCFRPAGHQTGIPTVGMAVGILLTTLLVIGIILAVVFIRIKKDKGKDNVESAQASEVKPLRS

SEQ ID NO: 1088 - DNA, 33 bp, Artificial Sequence
  Primer
cgagcgaattcatatgggtacgagtaagcaatg

SEQ ID NO: 1089 - DNA, 33 bp, Artificial Sequence
  Primer
gcgatgcctcgagttatttgttcccgatctggc

SEQ ID NO: 1090 - DNA, 37 bp, Artificial Sequence
  Primer
gcatgcatgcggccgcacaagaggggaagtttagtgg

SEQ ID NO: 1091 - DNA, 37 bp, Artificial Sequence
  Primer
gcgatgcctcgagtcagcttctcagaggtttgacttc

SEQ ID NO: 1092 - DNA, 2864 bp, Homo sapiens
gattaccaagcaagaacagctaaaatgaaagccatcattcatcttactcttcttgctctcctttctgtaaacacagccaccaaccaaggcaactcagctgatgctgtaacaaccacagaaactgcgactagtggtcctacagtagctgcagctgataccactgaaactaatttccctgaaactgctagcaccacagcaaatacaccttctttcccaacagctacttcacctgctccccccataattagtacacatagttcctccacaattcctacacctgctccccccataattagtacacatagttcctccacaattcctatacctactgctgcagacagtgagtcaaccacaaatgtaaattcattagctacctctgacataatcaccgcttcatctccaaatgatggattaatcacaatggttccttctgaaacacaaagtaacaatgaaatgtcccccaccacagaagacaatcaatcatcagggcctcccactggcaccgctttattggagaccagcaccctaaacagcacaggtcccagcaatccttgccaagatgatccctgtgcagataattcgttatgtgttaagctgcataatacaagtttttgcctgtgtttagaagggtattactacaactcttctacatgtaagaaaggaaaggtattccctgggaagatttcagtgacagtatcagaaacatttgacccagaagagaaacattccatggcctatcaagacttgcatagtgaaattactagcttgtttaaagatgtatttggcacatctgtttatggacagactgtaattcttactgtaagcacatctctgtcaccaagatctgaaatgcgtgctgatgacaagtttgttaatgtaacaatagtaacaattttggcagaaaccacaagtgacaatgagaagactgtgactgagaaaattaataaagcaattagaagtagctcaagcaactttctaaactatgatttgacccttcggtgtgattattatggctgtaaccagactgcggatgactgcctcaatggtttagcatgcgattgcaaatctgacctgcaaaggcctaacccacagagccctttctgcgttgcttccagtctcaagtgtcctgatgcctgcaacgcacagcacaagcaatgcttaataaagaagagtggtggggcccctgagtgtgcgtgcgtgcccggctaccaggaagatgctaatgggaactgccaaaagtgtgcatttggctacagtggactcgactgtaaggacaaatttcagctgatcctcactattgtgggcaccatcgctggcattgtcattctcagcatgataattgcattgattgtcacagcaagatcaaataacaaaacgaagcatattgaagaagagaacttgattgacgaagactttcaaaatctaaaactgcggtcgacaggcttcaccaatcttggagcagaagggagcgtctttcctaaggtcaggataacggcctccagagacagccagatgcaaaatccctattcaagacacagcagcatgccccgccctgactattagaatcataagaatgtggaacccgccatggcccccaaccaatgtacaagctattatttagagtgtttagaaagactgatggagaagtgagcaccagtaaagatctggcctccggggtttttcttccatctgacatctgccagcctctctgaatggaagttgtgaatgtttgcaacgaatccagctcacttgctaaataagaatctatgacattaaatgtagtagatgctattagcgcttgtcagagaggtggttttcttcaatcagtacaaagtactgagacaatggttagggttgttttcttaattcttttcctggtagggcaacaagaaccatttccaatctagaggaaagctccccagcattgcttgctcctgggcaaacattgctcttgagttaagtgacctaattcccctgggagacatacgcatcaactgtggaggtccgaggggatgagaagggatacccaccacctttcaagggtcacaagctcactctctgacaagtcagaatagggacactgcttctatccctccaatggagagattctggcaacctttgaacagcccagagcttgcaacctagcctcacccaagaagactggaaagagacatatctctcagctttttcaggaggcgtgcctgggaatccaggaactttttgatgctaattagaaggcctggactaaaaatgtccactatggggtgcactctacagtttttgaaatgctaggaggcagaaggggcagagagtaaaaaacatgacctggtagaaggaagagaggcaaaggaaactgggtggggaggatcaattagagaggaggcacctgggatccaccttcttccttaggtcccctcctccatcagcaaaggagcacttctctaatcatgccctcccgaagactggctgggagaaggtttaaaaacaaaaaatccaggagtaagagccttaggtcagtttgaaattggagacaaactgtctggcaaagggtgcgagagggagcttgtgctcaggagtccagccgtccagcctcggggtgtaggtttctgaggtgtgccattggggcctcagccttctctggtgacagaggctcagctgtggccaccaacacacaaccacacacacacaaccacacacacaaatgggggcaaccacatccagtacaagcttttacaaatgttattagtgtccttttttatttctaatgccttgtcctcttaaaagttattttatttgttattattatttgttcttgactgttaattgtgaatggtaatgcaataaagtgcctttgttagatggtg

SEQ ID NO: 1093 - protein, 512 aa, Homo sapiens
MKAIIHLTLLALLSVNTATNQGNSADAVTTTETATSGPTVAAADTTETNFPETASTTANTPSFPTATSPAPPIISTHSSSTIPTPAPPIISTHSSSTIPIPTAADSESTTNVNSLATSDIITASSPNDGLITMVPSETQSNNEMSPTTEDNQSSGPPTGTALLETSTLNSTGPSNPCQDDPCADNSLCVKLHNTSFCLCLEGYYYNSSTCKKGKVFPGKISVTVSETFDPEEKHSMAYQDLHSEITSLFKDVFGTSVYGQTVILTVSTSLSPRSEMRADDKFVNVTIVTILAETTSDNEKTVTEKINKAIRSSSSNFLNYDLTLRCDYYGCNQTADDCLNGLACDCKSDLQRPNPQSPFCVASSLKCPDACNAQHKQCLIKKSGGAPECACVPGYQEDANGNCQKCAFGYSGLDCKDKFQLILTIVGTIAGIVILSMIIALIVTARSNNKTKHIEEENLIDEDFQNLKLRSTGFTNLGAEGSVFPKVRITASRDSQMQNPYSRHSSMPRPDY

SEQ ID NO: 1094 - DNA, 6410 bp, Homo sapiens
acctgcacagtggcgagaccaaggacccagagagaaaggtgagagtgcagccggggaggctgaggatcggcggagctggaagagtgagggtgaaggcaagaagtagagcacagaagcaaagattttaagaggaaagaagacatctgaacccaacaccaccctaaaccacaggctgcagggttggcatgctccgtgcaagaccagaggcactgatgctcctgggagctcttctgactggatccctgggtccatcgggcagtcaggacgcactctcactgccctgggaagtgcagcgctatgacggctggtttaacaacctgaggcaccacgagcgtggtgctgttggctgccggttgcagcgccgcgtaccagccaattacgccgacggtgtgtatcaggctctggaggagccgcagctgcccaacccgcgccggctcagcaacgcagccacgcggggcatagccggcctgccgtcgctccacaaccgcaccgtactgggggtcttctttggctaccatgttctttccgacgtggtgagcgtggaaacgcccggttgccccgccgagttcctcaacatccgcatcccacctggagaccccgtgttcgaccccgaccagcgcggggacgtggtgctgcccttccagaggagccgctgggaccccgagaccggacggagtcccagcaacccccgggacctggccaaccaggtgacgggctggctggacggcagcgccatctatggctcctcgcactcctggagcgacgcgctgcggagcttctcggggggacagctggcgtcggggcccgaccccgctttcccccgagactcgcagaaccccctgctcatgtgggcggcgcccgaccccgccaccgggcagaacgggccccgggggctgtacgccttcggggcagagagagggaaccgggaacccttcctgcaggcgctgggcctgctctggttccgctaccacaacctgtgggcgcagaggctggcccgccagcacccagactgggaggacgaggagctgttccagcacgcacgcaagagggtcatcgccacctaccagaacatcgctgtgtatgagtggctgcccagcttcctgcagaaaacactcccggagtatacaggataccgtcctttcctagaccccagcatctccccggaatttgtggtggcctctgagcagttcttctctaccatggtgccccctggtgtctacatgagaaatgccagctgtcatttccggaaggtcctgaacaagggttttcaaagctcccaagctctcagggtctgcaacaactactggattcgggagaaccccaatctgaacagtacccaggaggtgaatgagctgctgctgggaatggcctcccagatttcggagttggaggacaacatagtggttgaagatctgagggattactggcctggccctggcaaattctcccgtacagactatgtggccagcagcatccaacgtggccgagatatggggctgcccagctatagccaggccctgctggcctttgggctggacatcccaaggaactggagtgatctcaaccctaatgtggacccccaggtgctggaggccacagctgccctgtacaaccaggacctatcccagctagagctgctccttggcgggctcctggagagccatggggaccctggacccctgttcagtgccattgtcctcgaccagtttgtacggctgcgggatggtgaccgctactggtttgagaacaccaggaatgggctgttctccaagaaggagattgaagacatccgaaataccaccctgcgggacgtgctggtcgctgttatcaacattgaccccagtgccctgcagcccaatgtctttgtctggcataaaggtgcaccctgccctcaacctaagcagctcacaactgacggcctgccccagtgtgcacccctgactgtgcttgacttctttgaaggcagcagccctggttttgccatcaccatcattgctctctgctgccttcccttagtgagtctgcttctctctggagtggtggcctatttccggggccgagaacacaagaagctacaaaagaaactcaaagagagcgtgaagaaggaagcagccaaagatggagtgccagcgatggagtggccaggccccaaggagaggagcagtcccatcatcatccagctgctgtcagacaggtgtctgcaggtcctgaacaggcatctcactgtgctccgtgtggtccagctgcagcctctgcagcaggtcaacctcatcctgtccaacaaccgaggatgccgcaccctgctgctcaagatccctaaggagtatgacctggtgctgctgtttagttctgaagaggaacggggcgcctttgtgcagcagctatgggacttctgcgtgcgctgggctctgggcctccatgtggctgagatgagcgagaaggagctatttaggaaggctgtgacaaagcagcagcgggaacgcatcctggagatcttcttcagacacctttttgctcaggtgctggacatcaaccaggccgacgcagggaccctgcccctggactcctcccagaaggtgcgggaggccctgacctgcgagctgagcagggccgagtttgccgagtccctgggcctcaagccccaggacatgtttgtggagtccatgttctctctggctgacaaggatggcaatggctacctgtccttccgagagttcctggacatcctggtggtcttcatgaaaggctccccagaggataagtcccgtctaatgtttaccatgtatgacctggatgagaatggcttcctctccaaggacgaattcttcaccatgatgcgatccttcatcgagatctccaacaactgcctgtccaaggcccagctggccgaggtggtggagtctatgttccgggagtcgggattccaggacaaggaggagctgacatgggaggattttcacttcatgctgcgggaccatgacagcgagctccgcttcacgcagctctgtgtcaaaggtggaggtggaggtggaaatggtattagagatatctttaaacaaaacatcagctgtcgagtctcgttcatcactcggacacctggggagcgctcccacccccagggactggggccccctgccccagaagccccagagctgggaggccctggactgaagaagaggtttggcaaaaaggcagcagtgcccactccccggctgtacacagaggcgctgcaagagaagatgcagcgaggcttcctagcccaaaagctgcagcagtacaagcgcttcgtggagaactaccggaggcacatcgtgtgtgtggcaatcttctcggccatctgtgttggcgtgtttgcagatcgtgcttactactatggctttgccttgccaccctcggacattgcacagaccaccctcgtgggcatcatcctgtcacgaggcacggcggccagcgtctccttcatgttctcttatatcttgctcaccatgtgccgcaacctcataaccttcctgcgagagactttcctcaaccgctatgtgccttttgatgccgcagtggacttccaccgctggatcgccatggctgctgttgtcctggccattttgcacagtgctggccacgcagtcaatgtctacatcttctcagtcagcccactcagcctgctggcctgcatattccccaacgtctttgtgaatgatgggtccaagcttccccagaagttctattggtggttcttccagaccgtcccaggtatgacaggtgtgcttctgctcctggtcctggccatcatgtatgtcttcgcctcccaccacttccgccgccgcagcttccggggcttctggctgacccaccacctctacatcctgctctatgccctgctcatcatccatggcagctatgctctgatccagctgcccactttccacatctacttcctggtcccggcaatcatctatggaggtgacaagctggtgagcctgagccggaagaaggtggagatcagcgtggtgaaggcggagctgctgccctcaggagtgacctacctgcaattccagaggccccaaggctttgagtacaagtcaggacagtgggtgcggatcgcctgcctggctctggggaccaccgagtaccaccccttcacactgacctccgcgccccatgaggacacactcagcctgcacatccgggcagtggggccctggaccactcgcctcagggagatctactcatccccaaagggcaatggctgtgctggatacccaaagctgtaccttgatggaccgtttggagagggccatcaggagtggcataaatttgaggtgtcagtgttggtgggagggggcattggggtcaccccctttgcctccatcctcaaagacctggtcttcaagtcatccttgggcagccaaatgctgtgtaagaagatctacttcatctgggtgacacggacccagcgtcagtttgagtggctggctgacatcatccaagaggtggaggagaacgaccaccaggacctggtgtctgtgcacatttatgtcacccagctggctgagaagttcgacctcaggaccaccatgctatacatctgcgagcggcacttccagaaagtgctgaaccggagtctgttcacgggcctgcgctccatcacccactttggccgtccccccttcgagcccttcttcaactccctgcaggaggtccacccacaggtgcgcaagatcggggtgttcagctgcggccctccaggaatgaccaagaatgtagagaaggcctgtcagctcgtcaacaggcaggaccgagcccacttcatgcaccactatgagaacttctgagcctgtcctccctggctgctgcttccagtatcctgccttctcttctgtgcacctaagttgcccagccctgctggcaatctctccatcagaatccaccttaggcctcagctggagggctgcagagcccctcccaatattgggagaatattgacccagacaattatacaaatgagaaaaggcaggagactatgttctacaattgcagtgcatgatgattataagtccacctgtttatcaacggcaccattcctgcagccctccagacttcctgcccttagcaagtgcgcaaccagtcaggatctcccaaagaagataaagaccactcctcaccccagctcaagccatggcaggcgtggcaagcaaagtggggaggagacagtccctgcttgtgacaagtgtggaggtgaaaaggtacaatagtgcttgtctccgatagctccccacatctctaattgacttccacaaaatcgatgcgttgctttggtatttgcttggactgacatttgagggaggaggaggctgggatcctctggctgagaatctcctcagagcccagtgcagaagctgtgatgcttagaacctggacagcccgactgcctcaactctgtctccaggtctattccctccagctccaaaaggagcagccctacttctaccccttcccgtccccaaagtgtcagcaactttgaggagggcaccaggaaacaaagatgcctccccagccctgatattcttgatgtcaccagtgatacccactgccctgacccctgggcaggcccctctctgcatctactggagtggtccctgggctctggggctgaaggattccagcctctctgccagatattcagtactcgatctcaattcccctcttccacaagagttgggtgaccagctgtcctagtttgcccaggactctccctgttttagcactgaaagtctcttgccccaggaaaccccatcagtcccaggcagattgggacagctggtcaccttacgcaagagccaggctgaaacatcccctccatactcagctctttaacttttcttttcctttttcatcgggctctttcctaaaaagctgagctgtaaaatattttacatcgaggtataataaataatcatgtacatgttttaccaccacccaggtcaagacatagaatgtttcaacatttccatcaccccagaaactccccttgtacccccttccacttcgtctcccctagctcctagaagcaaccactgatgtgatttctaccaaatccagttttggtcctactaaatatactcttttgagactggcctcttttactcaccataatgcctttgtaattcatccatgctgttgtgtgtatcagcagtttgttccttttcattgctgagtagtattctattgtagagatgtaccacagtttgtttattcttctgttgatggacgtttgggttgtttctaattttgaatgattataaataaaaattctgtgagtgttcttgtaaaaaaaaaaaaaaaaaaaaaaaaaaaaaaaaaaaaaaaaaaaaaaaaaaaaaaaaaaaaaaaaaaaaaaaaaaaaaaaaaaa

SEQ ID NO: 1095 - protein, 1548 aa, Homo sapiens
MLRARPEALMLLGALLTGSLGPSGSQDALSLPWEVQRYDGWFNNLRHHERGAVGCRLQRRVPANYADGVYQALEEPQLPNPRRLSNAATRGIAGLPSLHNRTVLGVFFGYHVLSDVVSVETPGCPAEFLNIRIPPGDPVFDPDQRGDVVLPFQRSRWDPETGRSPSNPRDLANQVTGWLDGSAIYGSSHSWSDALRSFSGGQLASGPDPAFPRDSQNPLLMWAAPDPATGQNGPRGLYAFGAERGNREPFLQALGLLWFRYHNLWAQRLARQHPDWEDEELFQHARKRVIATYQNIAVYEWLPSFLQKTLPEYTGYRPFLDPSISPEFVVASEQFFSTMVPPGVYMRNASCHFRKVLNKGFQSSQALRVCNNYWIRENPNLNSTQEVNELLLGMASQISELEDNIVVEDLRDYWPGPGKFSRTDYVASSIQRGRDMGLPSYSQALLAFGLDIPRNWSDLNPNVDPQVLEATAALYNQDLSQLELLLGGLLESHGDPGPLFSAIVLDQFVRLRDGDRYWFENTRNGLFSKKEIEDIRNTTLRDVLVAVINIDPSALQPNVFVWHKGAPCPQPKQLTTDGLPQCAPLTVLDFFEGSSPGFAITIIALCCLPLVSLLLSGVVAYFRGREHKKLQKKLKESVKKEAAKDGVPAMEWPGPKERSSPIIIQLLSDRCLQVLNRHLTVLRVVQLQPLQQVNLILSNNRGCRTLLLKIPKEYDLVLLFSSEEERGAFVQQLWDFCVRWALGLHVAEMSEKELFRKAVTKQQRERILEIFFRHLFAQVLDINQADAGTLPLDSSQKVREALTCELSRAEFAESLGLKPQDMFVESMFSLADKDGNGYLSFREFLDILVVFMKGSPEDKSRLMFTMYDLDENGFLSKDEFFTMMRSFIEISNNCLSKAQLAEVVESMFRESGFQDKEELTWEDFHFMLRDHDSELRFTQLCVKGGGGGGNGIRDIFKQNISCRVSFITRTPGERSHPQGLGPPAPEAPELGGPGLKKRFGKKAAVPTPRLYTEALQEKMQRGFLAQKLQQYKRFVENYRRHIVCVAIFSAICVGVFADRAYYYGFALPPSDIAQTTLVGIILSRGTAASVSFMFSYILLTMCRNLITFLRETFLNRYVPFDAAVDFHRWIAMAAVVLAILHSAGHAVNVYIFSVSPLSLLACIFPNVFVNDGSKLPQKFYWWFFQTVPGMTGVLLLLVLAIMYVFASHHFRRRSFRGFWLTHHLYILLYALLIIHGSYALIQLPTFHIYFLVPAIIYGGDKLVSLSRKKVEISVVKAELLPSGVTYLQFQRPQGFEYKSGQWVRIACLALGTTEYHPFTLTSAPHEDTLSLHIRAVGPWTTRLREIYSSPKGNGCAGYPKLYLDGPFGEGHQEWHKFEVSVLVGGGIGVTPFASILKDLVFKSSLGSQMLCKKIYFIWVTRTQRQFEWLADIIQEVEENDHQDLVSVHIYVTQLAEKFDLRTTMLYICERHFQKVLNRSLFTGLRSITHFGRPPFEPFFNSLQEVHPQVRKIGVFSCGPPGMTKNVEKACQLVNRQDRAHFMHHYENF

SEQ ID NO: 1096 - DNA, 1109 bp, Homo sapiens
ggcacgagggcagctcttctcacaggaccagccactagcgcagcctcgagcgatggcctatgtccccgcaccgggctaccagcccacctacaacccgacgctgccttactaccagcccatcccgggcgggctcaacgtgggaatgtctgtttacatccaaggagtggccagcgagcacatgaagcggttcttcgtgaactttgtggttgggcaggatccgggctcagacgtcgccttccacttcaatccgcggtttgacggctgggacaaggtggtcttcaacacgttgcagggcgggaagtggggcagcgaggagaggaagaggagcatgcccttcaaaaagggtgccgcctttgagctggtcttcatagtcctggctgagcactacaaggtggtggtaaatggaaatcccttctatgagtacgggcaccggcttcccctacagatggtcacccacctgcaagtggatggggatctgcaacttcaatcaatcaacttcatcggaggccagcccctccggccccagggacccccgatgatgccaccttaccctggtcccggacattgccatcaacagctgaacagcctgcccaccatggaaggacccccaaccttcaacccgcctgtgccatatttcgggaggctgcaaggagggctcacagctcgaagaaccatcatcatcaagggctatgtgcctcccacaggcaagagctttgctatcaacttcaaggtgggctcctcaggggacatagctctgcacattaatccccgcatgggcaacggtaccgtggtccggaacagccttctgaatggctcgtggggatccgaggagaagaagatcacccacaacccatttggtcccggacagttctttgatctgtccattcgctgtggcttggatcgcttcaaggtttacgccaatggccagcacctctttgactttgcccatcgcctctcggccttccagagggtggacacattggaaatccagggtgatgtcaccttgtcctatgtccagatctaatctattcctggggccataactcatgggaaaacagaattatcccctaggactcctttctaagcccctaataaaatgtctgagggtg

SEQ ID NO: 1097 - DNA, 3459 bp, Homo sapiens
cagagggctgctggctggctaagtccctcccgctcccggctctcgcctcactaggagcggctctcggtgcagcgggacagggcgaagcggcctgcgcccacggagcgcgcgacactgcccggaagggaccgccacccttgccccctcagctgcccactcgtgatttccagcggcctccgcgcgcgcacgatgccctcggccaccagccacagcgggagcggcagcaagtcgtccggaccgccaccgccgtcgggttcctccgggagtgaggcggccgcgggagccggggccgccgcgccggcttctcagcaccccgcaaccggcaccggcgctgtccagaccgaggccatgaagcagattctcggggtgatcgacaagaaacttcggaacctggagaagaaaaagggtaagcttgatgattaccaggaacgaatgaacaaaggggaaaggcttaatcaagatcagctggatgccgtttctaagtaccaggaagtcacaaataatttggagtttgcaaaagaattacagaggagtttcatggcactaagtcaagatattcagaaaacaataaagaagacagcacgtcgggagcagcttatgagagaagaagctgaacagaaacgtttaaaaactgtacttgagctacagtatgttttggacaaattgggagatgatgaagtgcggactgacctgaaacaaggtttgaatggagtgccaatattgtccgaagaggagttgtcattgttggatgaattctataagctagtagaccctgaacgggacatgagcttgaggttgaatgaacagtatgaacatgcctccattcacctgtgggacctgctggaagggaaggaaaaacctgtatgtggaaccacctataaagttctaaaggaaattgttgagcgtgtttttcagtcaaactactttgacagcacccacaaccaccagaatgggctgtgtgaggaagaagaggcagcctcagcacctgcagttgaagaccaggtacctgaagctgaacctgagccagcagaagagtacactgagcaaagtgaagttgaatcaacagagtatgtaaatagacagttcatggcagaaacacagttcaccagtggtgaaaaggagcaggtagatgagtggacagttgaaacggttgaggtggtaaattcactccagcagcaacctcaggctgcatccccttcagtaccagagccccactctttgactccagtggctcaggcagatccccttgtgagaagacagcgagtacaagaccttatggcacaaatgcagggtccctataatttcatacaggattcaatgctggattttgaaaatcagacacttgatcctgccattgtatctgcacagcctatgaatccaacacaaaacatggacatgccccagctggtttgccctccagttcattctgaatctagacttgctcagcctaatcaagttcctgtacaaccagaagcgacacaggttcctttggtatcatccacaagtgaggggtacacagcatctcaacccttgtaccagccttctcatgctacagagcaacgaccacagaaggaaccaattgatcagattcaggcaacaatctctttaaatacagaccagactacagcatcatcatcccttcctgctgcgtctcagcctcaagtatttcaggctgggacaagcaaacctttacatagcagtggaatcaatgtaaatgcagctccattccaatccatgcaaacggtgttcaatatgaatgccccagttcctcctgttaatgaaccagaaactttaaaacagcaaaatcagtaccaggccagttataaccagagcttttctagtcagcctcaccaagtagaacaaacagagcttcagcaagaacagcttcaaacagtggttggcacttaccatggttccccagaccagtcccatcaagtgactggtaaccaccagcagcctcctcagcagaacactggatttccacgtagcaatcagccctattacaatagtcgtggtgtgtctcgtggaggctcccgtggtgctagaggcttgatgaatggataccggggccctgccaatggattcagaggaggatatgatggttaccgcccttcattctctaacactccaaacagtggttatacacagtctcagttcagtgctccccgggattactctggctatcaacgggatggatatcagcagaatttcaagcgaggctctgggcagagtggaccacggggagccccacgaggtcgtggagggcccccaagacccaacagagggatgccgcaaatgaacactcagcaagtgaattaatctgattcacaggattatgtttaatcgccaaaaacacactggccagtgtaccataatatgttaccagaagagttattatctatttgttctccctttcaggaaacttattgtaaagggactgttttcatcccataaagacaggactacaattgtcagctttctattacctggatatggaaggaaactatttttactctgcatgttctgtcctaagcgtcatcttgagccttgcacatgatactcagattcctcacccttgcttaggagtaaaacaatatactttacagggtgataataatctccatagttatttgaagtggcttgaaaaaggcaagattgacttttatgacattggataaaatctacaaatcagccctcgagttattcaatgataactgacaaactaaattatttccctagaaaggaagatgaaaggagtggagtgtggtttggcagaacaactgcatttcacagcttttccagttaaattggagcactgaacgttcagatgcataccaaattatgcatgggtcctaatcacacatataaggctggctaccagctttgacacagcactgttcatctggccaaacaactgtggttaaaaacacatgtaaaatgctttttaacagctgatactgtataagacaaagccaagatgcaaaattaggctttgattggcactttttgaaaaatatgcaacaaatatgggatgtaatccggatggccgcttctgtacttaatgtgaaatatttagatacctttttgaacacttaacagtttctttgagacaatgacttttgtaaggattggtactatctatcattccttatgacatgtacattgtctgtcactaatccttggattttgctgtattgtcacctaaattggtacaggtactgatgaaaatctctagtggataatcataacactctcggtcacatgtttttccttcagcttgaaagcttttttttaaaaggaaaagataccaaatgcctgctgctaccacccttttcaattgctatcttttgaaaggcaccagtatgtgttttagattgatttccctgtttcagggaaatcacggacagtagtttcagttctgatggtataagcaaaacaaataaaacgtttataaaagtt

SEQ ID NO: 1098 - DNA, 875 bp, Homo sapiens
cgagcggcacgagccgattcctagccgccgactcacacaaggcaggtgggtgaggaaatccagagttgccatggagaaaattccagtgtcagcattcttgctccttgtggccctctcctacactctggccagagataccacagtcaaacctggagccaaaaaggacacaaaggactctcgacccaaactgccccagaccctctccagaggttggggtgaccaactcatctggactcagacatatgaagaagctctatataaatccaagacaagcaacaaacccttgatgattattcatcacttggatgagtgcccacacagtcaagctttaaagaaagtgtttgctgaaaataaagaaatccagaaattggcagagcagtttgtcctcctcaatctggtttatgaaacaactgacaaacacctttctcctgatggccagtatgtccccaggattatgtttgttgacccatctctgacagttagagccgatatcactggaagatattcaaatcgtctctatgcttacgaacctgcagatacagctctgttgcttgacaacatgaagaaagctctcaagttgctgaagactgaattgtaaagaaaaaaaatctccaagcccttctgtctgtcaggccttgagacttgaaaccagaagaagtgtgagaagactggctagtgtggaagcatagtgaacacactgattaggttatggtttaatgttacaacaactattttttaagaaaaacaagttttagaaatttggtttcaagtgtacatgtgtgaaaacaatattgtatactaccatagtgagccatgattttctaaaaaaaaaaataaatgttttgggggtgttctgttttctcccaaaaaaaaaa

SEQ ID NO: 1099 - DNA, 1987 bp, Homo sapiens
ctcgagagctccgccatggccgctctcacccgggacccccagttccagaagctgcagcaatggtaccgcgagcaccgctccgagctgaacctgcgccgcctcttcgatgccaacaaggaccgcttcaaccacttcagcttgaccctcaacaccaaccatgggcatatcctggtggattactccaagaacctggtgacggaggacgtgatgcggatgctggtggacttggccaagtccaggggcgtggaggccgcccgggagcggatgttcaatggtgagaagatcaactacaccgagggtcgagccgtgctgcacgtggctctgcggaaccggtcaaacacacccatcctggtagacggcaaggatgtgatgccagaggtcaacaaggttctggacaagatgaagtctttctgccagcgtgtccggagcggtgactggaaggggtacacaggcaagaccatcacggacgtcatcaacattggcattgtcggctccgacctgggacccctcatggtgactgaagcccttaagccatactcttcaggaggtccccgcgtctggtatgtctccaacattgatggaactcacattgccaaaaccctggcccagctgaacccggagtcctccctgttcatcattgcctccaagacctttactacccaggagaccatcacgaatgcagagacggcgaaggagtggtttctccaggcggccaaggatccttctgcagtggcgaagcactttgttgccctgtctactaacacaaccaaagtgaaggagtttggaattgaccctcaaaacatgttcgagttctgggattgggtgggaggacgctactcgctgtggtcggccatcggactctccattgccctgcacgtgggttttgacaacttcgagcagctgctctcgggggctcactggatggaccagcacttccgcacgacgcccctggagaagaacgcccccgtcttgctggccctgctgggtatctggtacatcaactgctttgggtgtgagacacacgccatgctgccctatgaccagtacctgcaccgctttgctgcgtacttccagcagggcgacatggagtccaatgggaaatacatcaccaaatctggaacccgtgtggaccaccagacaggccccattgtgtggggggagccagggaccaatggccagcatgctttttaccagctcatccaccaaggcaccaagatgataccctgtgacttcctcatcccggtccagacccagcaccccatacggaagggtctgcatcacaagatcctcctggccaacttcttggcccagacagaggccctgatgaggggaaaatcgacggaggaggcccgaaaggagctccaggctgcgggcaagagtccagaggaccttgagaggctgctgccacataaggtctttgaaggaaatcgcccaaccaactctattgtgttcaccaagctcacaccattcatgcttggagccttggtcgccatgtatgagcacaagatcttcgttcagggcatcatctgggacatcaacagctttgaccagtggggagtggagctgggaaagcagctggctaagaaaatagagcctgagcttgatggcagtgctcaagtgacctctcacgacgcttctaccaatgggctcatcaacttcatcaagcagcagcgcgaggccagagtccaataaactcgtgctcatctgcagcctcctctgtgactcccctttctcttctcgtccctcctccccggagccggcactgcatgttcctggacaccacccagagcaccctctggttgtgggcttggaccacgagcccttagcagggaaggctggtctcccccagcctaacccccagcccctccatgtctatgctccctctgtgttagaattggctgaagtgtttttgtgcagctgacttttctgacccatgttcacgttgttcacatcccatgtagaaaaacaaagatgccacggaggaggt

SEQ ID NO: 1100 - DNA, 401 bp, Homo sapiens
ggcagagcgtcagcaagagtacagagagaaactccaagggctgtgtgatctcctcacccagactgaaaaccgcctaattagtaaccaggaagcctttgtgattggagacggcacggtggagttacagaagtaccagtccaagcaagaggaattacagagagatatgcaaggaagtacacaggcaatggaagaaatagtgcgaaacacagaactctttttaaaagagagcggtgacgagttgtcccaagcggatagagctttgattgagcagaaactgaacgaggtgaagatgaagtgtgcgcagctgaacttaaaggctgagcagtcgagaaaggagttggataaggcagtgactacggccctcaaggaggagactgaaaaggttgcagctgtgaggcagc

SEQ ID NO: 1101 - DNA, 2839 bp, Homo sapiens
gcacgagctgcggctccgctctcgtcgcaacgagatctttcgagatcttctccgcccccgctaccggcgcctcctctgcggccactgagccggagccggcctgagcagcgctctcggttgcagtacccactggaaggacttaggcgctcgcgtggacaccgcaagcccctcagtagcctcggcccaagaggcctgctttccactcgctagccccgccggggtccgtgtcctgtctcggtggccggacccgggcccgagcccgagcagtagccggcgccatgtcggtggtgggcatagacctgggcttccagagctgctacgtcgctgtggcccgcgccggcggcatcgagactatcgctaatgagtatagcgaccgctgcacgccggcttgcatttcttttggtcctaagaatcgttcaattggagcagcagctaaaagccaggtaatttctaatgcaaagaacacagtccaaggatttaaaagattccatggccgagcattctctgatccatttgtggaggcagaaaaatctaaccttgcatatgatattgtgcagttgcctacaggattaacaggtataaaggtgacatatatggaggaagagcgaaattttaccactgagcaagtgactgccatgcttttgtccaaactgaaggagacagccgaaagtgttcttaagaagcctgtagttgactgtgttgtttcggttccttgtttctatactgatgcagaaagacgatcagtgatggatgcaacacagattgctggtcttaattgcttgcgattaatgaatgaaaccactgcagttgctcttgcatatggaatctataagcaggatcttcctgccttagaagagaaaccaagaaatgtagtttttgtagacatgggccactctgcttatcaagtttctgtatgtgcatttaatagaggaaaactgaaagttctggccactgcatttgacacgacattgggaggtagaaaatttgatgaagtgttagtaaatcacttctgtgaagaatttgggaagaaatacaagctagacattaagtccaaaatccgtgcattattacgactctctcaggagtgtgagaaactcaagaaattgatgagtgcaaatgcttcagatctccctttgagcattgaatgttttatgaatgatgttgatgtatctggaactatgaatagaggcaaatttctggagatgtgcaatgatctcttagctagagtggagccaccacttcgtagtgttttggaacaaaccaagttaaagaaagaagatatttatgcagtggagatagttggtggtgctacacgaatccctgcggtaaaagagaagatcagcaaatttttcggtaaagaacttagtacaacattaaatgctgatgaagctgtcactcgaggctgtgcattgcagtgtgccatcttatcgcctgctttcaaagtcagagaattttctatcactgatgtagtaccatatccaatatctctgagatggaattctccagctgaagaagggtcaagtgactgtgaagtcttttccaaaaatcatgctgctcctttctctaaagttcttacattttatagaaaggaacctttcactcttgaggcctactacagctctcctcaggatttgccctatccagatcctgctatagctcagttttcagttcagaaagtcactcctcagtctgatggctccagttcaaaagtgaaagtcaaagttcgagtaaatgtccatggcattttcagtgtgtccagtgcatctttagtggaggttcacaagtctgaggaaaatgaggagccaatggaaacagatcagaatgcaaaggaggaagagaagatgcaagtggaccaggaggaaccacatgttgaagagcaacagcagcagacaccagcagaaaataaggcagagtctgaagaaatggagacctctcaagctggatccaaggataaaaagatggaccaaccaccccaagccaagaaggcaaaagtgaagaccagtactgtggacctgccaatcgagaatcagctattatggcagatagacagagagatgctcaacttgtacattgaaaatgagggtaagatgatcatgcaggataaactggagaaggagcggaatgatgctaagaacgcagtgagggaatatgtgtatgaaatgagagacaagcttagtggtgaatatgagaagtttgtgagtgaagatggtcgtaacagttttactttgaaactggaagatactgaaaattggttgtatgaggatggagaagaccagccaaagcaagtttatgttgataagttggctgaattaaaaaatctaggtcaacctattaagatacgtttccaggaatctgaagaacgaccaaaattatttgaagaactagggaaacagatccaacagtatatgaaaataatcagctctttcaaaaacaaggaggaccagtatgatcatttggatgctgctgacatgacaaaggtagaaaaaagcacaaatgaagcaatggagtggatgaataacaagctaaatctgcagaacaagcagagtttgaccatggatccagttgtcaagtcaaaagagattgaagctaaaattaaggagctgacaagtacttgtagccctataatttcaaagcccaaacccaaagtggaacctccaaaagaggaacaaaaaaatgcagagcagaatggaccagtggatggacaaggagacaacccaggcccccaggctgctgagcagggtacagacacagctgtgccttcggattcagacaagaagcttcctgaaatggacattgattgattccaacacttgtttctattaaaacagactattataaa

SEQ ID NO: 1102 - protein, 840 aa, Homo sapiens
MSVVGIDLGFQSCYVAVARAGGIETIANEYSDRCTPACISFGPKNRSIGAAAKSQVISNAKNTVQGFKRFHGRAFSDPFVEAEKSNLAYDIVQLPTGLTGIKVTYMEEERNFTTEQVTAMLLSKLKETAESVLKKPVVDCVVSVPCFYTDAERRSVMDATQIAGLNCLRLMNETTAVALAYGIYKQDLPALEEKPRNVVFVDMGHSAYQVSVCAFNRGKLKVLATAFDTTLGGRKFDEVLVNHFCEEFGKKYKLDIKSKIRALLRLSQECEKLKKLMSANASDLPLSIECFMNDVDVSGTMNRGKFLEMCNDLLARVEPPLRSVLEQTKLKKEDIYAVEIVGGATRIPAVKEKISKFFGKELSTTLNADEAVTRGCALQCAILSPAFKVREFSITDVVPYPISLRWNSPAEEGSSDCEVFSKNHAAPFSKVLTFYRKEPFTLEAYYSSPQDLPYPDPAIAQFSVQKVTPQSDGSSSKVKVKVRVNVHGIFSVSSASLVEVHKSEENEEPMETDQNAKEEEKMQVDQEEPHVEEQQQQTPAENKAESEEMETSQAGSKDKKMDQPPQAKKAKVKTSTVDLPIENQLLWQIDREMLNLYIENEGKMIMQDKLEKERNDAKNAVREYVYEMRDKLSGEYEKFVSEDGRNSFTLKLEDTENWLYEDGEDQPKQVYVDKLAELKNLGQPIKIRFQESEERPKLFEELGKQIQQYMKIISSFKNKEDQYDHLDAADMTKVEKSTNEAMEWMNNKLNLQNKQSLTMDPVVKSKEIEAKIKELTSTCSPIISKPKPKVEPPKEEQKNAEQNGPVDGQGDNPGPQAAEQGTDTAVPSDSDKKLPEMDID

SEQ ID NO: 1103 - DNA, 2326 bp, Homo sapiens
ccatcctaatacgactcactatagggctcgagcggccgcccgggcaggtacgccctatacaacttggcttcacatacttttacactaactttatatgatttttaaaaactggtctgatcggacttctcgtcctgggacactgtttactggagtctggccggctctccgtgctcctcttggtacctcattttggggagaaccttaaacccactcgagcagataatctccgccttgaccggtgccaccaaagaagccttggaaccatgtggacttttctgggcattgccactttcacctatttttataagaagttcggggacttcatcactttggccaacagggaggtcctgttgtgcgtgctggtgttcctctcgctgggcctggtgctctcctaccgctgtcgccaccgaaacgggggtctcctcgggcgccagcagagcggctcccagttcgccctcttctcggatattctctcaggcctgcctttcattggcttcttctgggccaaatccccccctgaatcagaaaataaggagcagctcgaggccaggaggcgcagaaaaggaaccaatatttcagaaacaagcttaataggaacagctgcctgtacatcaacatcttctcagaatgacccagaagttatcatcgtgggagctggcgtgcttggctctgctttggcagctgtgctttccagagatggaagaaaggtgacagtcattgagagagacttaaaagagcctgacagaatagttggagaattcctgcagccgggtggttatcatgttctcaaagaccttggtcttggagatacagtggaaggtcttgatgcccaggttgtaaatggttacatgattcatgatcaggaaagcaaatcagaggttcagattccttaccctctgtcagaaaacaatcaagtgcagagtggaagagctttccatcacggaagattcatcatgagtctccggaaagcagctatggcagagcccaatgcaaagtttattgaaggtgttgtgttacagttattagaagaagatgatgttgtgatgggagttcagtacaaggataaagagactggagatatcaaggaactccatgctccactgactgttgttgcagatgggcttttctccaagttcaggaaaagcctggtctccaataaagtttctgtatcatctcattttgttggctttcttatgaagaatgcaccacagtttaaagcaaatcatgctgaacttattttagctaacccgagtccagttctcatctaccagatttcatccagtgaaactcgagtacttgttgacattagaggagaaatgccaaggaatttaagagaatacatggttgaaaaaatttacccacaaatacctgatcacctgaaagaaccattcttagaagccactgacaattctcatctgaggttcatgccagcaagcttccttcctccttcatcagtgaagaaacgaggtgttcttcttttgggagacgcatataatatgaggcatccacttactggtggaggaatgactgttgcttttaaagatataaaactatggagaaaactgctaaagggtatccctgacctttatgatgatgcagctattttcgaggccaaaaaatcattttactgggcaagaaaaacatctcattcctttgtcgtgaatatccttgctcaggctctttatgaattattttctgccacagatgattccctgcatcaactaagaaaagcctgttttctttatttcaaacttggtggcgaatgtgttgcgggtcctgttgggctgctttctgtattgtctcctaaccctctagttttaattggacacttctttgctgttgcaatctatgccgtgtatttttgctttaagtcagaaccttggattacaaaacctcgagcccttctcagtagtggtgctgtattgtacaaagcgtgttctgtaatatttcctctaatttactcagaaatgaagtatatggttcattaagcttaaaggggaaccatttgtgaatgaatatttggaacttaccaagtcctaagagacttttggaagaggatatatatagcatagtaccataccacttataaagtggaaactcttggaccaagatttggattaatttgtttttgaagttttttgtatataaatatgtaaatacatgctttaatttgcaatttaaaatgaaggggttaaataagttagacatttaaaagaaatgattgttaccataaattagtgctaatgctgaggagaactacagtttttcttttgaatttagtatttgagatgagttgttgggacatgcaaataaaatgaagaatgaa

SEQ ID NO: 1104 - DNA, 1484 bp, Homo sapiens
tggaagcgcgtgcttttgtttgtgtccctggccatggcgctgcagctctcccgggagcagggaatcaccctgcgcgggagcgccgaaatcgtggccgagttcttctcattcggcatcaacagcattttatatcagcgtggcatatatccatctgaaacctttactcgagtgcagaaatacggactcaccttgcttgtaactactgatcttgagctcataaaatacctaaataatgtggtggaacaactgaaagattggttatacaagtgttcagttcagaaactggttgtagttatctcaaatattgaaagtggtgaggtcctggaaagatggcagtttgatattgagtgtgacaagactgcaaaagatgacagtgcacccagagaaaagtctcagaaagctatccaggatgaaatccgttcagtgatcagacagatcacagctacggtgacatttctgccactgttggaagtttcttgttcatttgatctgctgatttatacagacaaagatttggttgtacctgaaaaatgggaagagtcgggaccacagtttattaccaattctgaggaagtgcgccttcgttcatttactactacaatccacaaagtaaatagcatggtggcctacaaaattcctgtcaatgactgaggatgacatgaggaaaataatgtaattgtaattttgaaatgtggttttcctgaaatcaggtcatctatagttgatatgttttatttcattggttaatttttacatggagaaaaccaaaatgatacttactgaactgtgtgtaattgttccttttatttttttggtacctatttgacttaccatggagttaacatcatgaatttattgcacattgttcaaaaggaaccaggaggtttttttgtcaacattgtgatgtatattcctttgaagatagtaactgtagatggaaaaacttgtgctataaagctagatgctttcctaaatcagatgttttggtcaagtagtttgactcagtataggtagggagatatttaagtataaaatacaacaaaggaagtctaaatattcagaatctttgttaaggtcctgaaagtaactcataatctataaacaatgaaatattgctgtatagctccttttgaccttcatttcatgtatagttttccctattgaatcagtttccaattatttgactttaatttatgtaacttgaacctatgaagcaatggatatttgtactgtttaatgttctgtgatacagaacagattaatactccctttttatcattacagttagctaaaaaattgccaggcagtccacaaaacagaatttgctttaagaccaacccacagagtcagctggagactaacggcgctggggcctgctgggccgggatatagtcgtgtttagctaagtgtcgagagcattaagaagaaagtcctggttggaggcgcaaggcctgcagcaccagctgtggaatccccaataatgt

SEQ ID NO: 1105 - DNA, 1917 bp, Homo sapiens
atttagagccgggtaggggagcgcagcggccagatacctcagcgctacctggcggaactggatttctctcccgcctgccggcctgcctgccacagccggactccgccactccggtagcctcatggctgcaacctgtgagattagcaacatttttagcaactacttcagtgcgatgtacagctcggaggactccaccctggcctctgttccccctgctgccacctttggggccgatgacttggtactgaccctgagcaacccccagatgtcattggagggtacagagaaggccagctggttgggggaacagccccagttctggtcgaagacgcaggttctggactggatcagctaccaagtggagaagaacaagtacgacgcaagcgccattgacttctcacgatgtgacatggatggcgccaccctctgcaattgtgcccttgaggagctgcgtctggtctttgggcctctgggggaccaactccatgcccagctgcgagacctcacttccagctcttctgatgagctcagttggatcattgagctgctggagaaggatggcatggccttccaggaggccctagacccagggccctttgaccagggcagcccctttgcccaggagctgctggacgacggtcagcaagccagcccctaccaccccggcagctgtggcgcaggagccccctcccctggcagctctgacgtctccaccgcagggactggtgcttctcggagctcccactcctcagactccggtggaagtgacgtggacctggatcccactgatggcaagctcttccccagcgatggttttcgtgactgcaagaagggggatcccaagcacgggaagcggaaacgaggccggccccgaaagctgagcaaagagtactgggactgtctcgagggcaagaagagcaagcacgcgcccagaggcacccacctgtgggagttcatccgggacatcctcatccacccggagctcaacgagggcctcatgaagtgggagaatcggcatgaaggcgtcttcaagttcctgcgctccgaggctgtggcccaactatggggccaaaagaaaaagaacagcaacatgacctacgagaagctgagccgggccatgaggtactactacaaacgggagatcctggaacgggtggatggccggcgactcgtctacaagtttggcaaaaactcaagcggctggaaggaggaagaggttctccagagtcggaactgagggttggaactatacccgggaccaaactcacggaccactcgaggcctgcaaaccttcctgggaggacaggcaggccagatggcccctccactggggaatgctcccagctgtgctgtggagagaagctgatgttttggtgtattgtcagccatcgtcctgggactcggagactatggcctcgcctccccaccctcctcttggaattacaagccctggggtttgaagctgactttatagctgcaagtgtatctccttttatctggtgcctcctcaaacccagtctcagacactaaatgcagacaacaccttcctcctgcagacacctggactgagccaaggaggcctggggaggccctaggggagcaccgtgatggagaggacagagcaggggctccagcaccttctttctggactggcgttcacctccctgctcagtgcttgggctccacgggcaggggtcagagcactccctaatttatgtgctatataaatatgtcagatgtacatagagatctattttttctaaaacattcccctccccactcctctcccacagagtgctggactgttccaggccctccagtgggctgatgctgggacccttaggatggggctcccagctcctttctcctgtgaatggaggcagagacctccaataaagtgccttctgggctttttct

SEQ ID NO: 1106 - DNA, 1528 bp, Homo sapiens
cggcgagcgagcaccttcgacgcggtccggggaccccctcgtcgctgtcctcccgacgcggacccgcgtgccccaggcctcgcgctgcccggccggctcctcgtgtcccactcccggcgcacgccctcccgcgagtcccgggcccctcccgcgcccctcttctcggcgcgcgcgcagcatggcgcccccgcaggtcctcgcgttcgggcttctgcttgccgcggcgacggcgacttttgccgcagctcaggaagaatgtgtctgtgaaaactacaagctggccgtaaactgctttgtgaataataatcgtcaatgccagtgtacttcagttggtgcacaaaatactgtcatttgctcaaagctggctgccaaatgtttggtgatgaaggcagaaatgaatggctcaaaacttgggagaagagcaaaacctgaaggggccctccagaacaatgatgggctttatgatcctgactgcgatgagagcgggctctttaaggccaagcagtgcaacggcacctccacgtgctggtgtgtgaacactgctggggtcagaagaacagacaaggacactgaaataacctgctctgagcgagtgagaacctactggatcatcattgaactaaaacacaaagcaagagaaaaaccttatgatagtaaaagtttgcggactgcacttcagaaggagatcacaacgcgttatcaactggatccaaaatttatcacgagtattttgtatgagaataatgttatcactattgatctggttcaaaattcttctcaaaaaactcagaatgatgtggacatagctgatgtggcttattattttgaaaaagatgttaaaggtgaatccttgtttcattctaagaaaatggacctgacagtaaatggggaacaactggatctggatcctggtcaaactttaatttattatgttgatgaaaaagcacctgaattctcaatgcagggtctaaaagctggtgttattgctgttattgtggttgtggtgatagcagttgttgctggaattgttgtgctggttatttccagaaagaagagaatggcaaagtatgagaaggctgagataaaggagatgggtgagatgcatagggaactcaatgcataactatataatttgaagattatagaagaagggaaatagcaaatggacacaaattacaaatgtgtgtgcgtgggacgaagacatctttgaaggtcatgagtttgttagtttaacatcatatatttgtaatagtgaaacctgtactcaaaatataagcagcttgaaactggctttaccaatcttgaaatttgaccacaagtgtcttatatatgcagatctaatgtaaaatccagaacttggactccatcgttaaaattatttatgtgtaacattcaaatgtgtgcattaaatatgcttccacagtaaaatctgaaaaactgatttgtgattgaaagctgcctttctatttacttgagtcttgtacatacatacttttttatgagctatgaaataaaacattttaaactg

SEQ ID NO: 1107 - protein, 574 aa, Homo sapiens
MWTFLGIATFTYFYKKFGDFITLANREVLLCVLVFLSLGLVLSYRCRHRNGGLLGRQQSGSQFALFSDILSGLPFIGFFWAKSPPESENKEQLEARRRRKGTNISETSLIGTAACTSTSSQNDPEVIIVGAGVLGSALAAVLSRDGRKVTVIERDLKEPDRIVGEFLQPGGYHVLKDLGLGDTVEGLDAQVVNGYMIHDQESKSEVQIPYPLSENNQVQSGRAFHHGRFIMSLRKAAMAEPNAKFIEGVVLQLLEEDDVVMGVQYKDKETGDIKELHAPLTVVADGLFSKFRKSLVSNKVSVSSHFVGFLMKNAPQFKANHAELILANPSPVLIYQISSSETRVLVDIRGEMPRNLREYMVEKIYPQIPDHLKEPFLEATDNSHLRFMPASFLPPSSVKKRGVLLLGDAYNMRHPLTGGGMTVAFKDIKLWRKLLKGIPDLYDDAAIFEAKKSFYWARKTSHSFVVNILAQALYELFSATDDSLHQLRKACFLYFKLGGECVAGPVGLLSVLSPNPLVLIGHFFAVAIYAVYFCFKSEPWITKPRALLSSGAVLYKACSVIFPLIYSEMKYMVH

SEQ ID NO: 1108 - protein, 205 aa, Homo sapiens
MALQLSREQGITLRGSAEIVAEFFSFGINSILYQRGIYPSETFTRVQKYGLTLLVTTDLELIKYLNNVVEQLKDWLYKCSVQKLVVVISNIESGEVLERWQFDIECDKTAKDDSAPREKSQKAIQDEIRSVIRQITATVTFLPLLEVSCSFDLLIYTDKDLVVPEKWEESGPQFITNSEEVRLRSFTTTIHKVNSMVAYKIPVND

SEQ ID NO: 1109 - protein, 371 aa, Homo sapiens
MAATCEISNIFSNYFSAMYSSEDSTLASVPPAATFGADDLVLTLSNPQMSLEGTEKASWLGEQPQFWSKTQVLDWISYQVEKNKYDASAIDFSRCDMDGATLCNCALEELRLVFGPLGDQLHAQLRDLTSSSSDELSWIIELLEKDGMAFQEALDPGPFDQGSPFAQELLDDGQQASPYHPGSCGAGAPSPGSSDVSTAGTGASRSSHSSDSGGSDVDLDPTDGKLFPSDGFRDCKKGDPKHGKRKRGRPRKLSKEYWDCLEGKKSKHAPRGTHLWEFIRDILIHPELNEGLMKWENRHEGVFKFLRSEAVAQLWGQKKKNSNMTYEKLSRAMRYYYKREILERVDGRRLVYKFGKNSSGWKEEEVLQSRN

SEQ ID NO: 1110 - protein, 314 aa, Homo sapiens
MAPPQVLAFGLLLAAATATFAAAQEECVCENYKLAVNCFVNNNRQCQCTSVGAQNTVICSKLAAKCLVMKAEMNGSKLGRRAKPEGALQNNDGLYDPDCDESGLFKAKQCNGTSTCWCVNTAGVRRTDKDTEITCSERVRTYWIIIELKHKAREKPYDSKSLRTALQKEITTRYQLDPKFITSILYENNVITIDLVQNSSQKTQNDVDIADVAYYFEKDVKGESLFHSKKMDLTVNGEQLDLDPGQTLIYYVDEKAPEFSMQGLKAGVIAVIVVVVIAVVAGIVVLVISRKKRMAKYEKAEIKEMGEMHRELNA

SEQ ID NO: 1111 - DNA, 1360 bp, Homo sapiens
cgggggttgctccgtccgtgctccgcctcgccatgacttcctacagctatcgccagtcgtcggccacgtcgtccttcggaggcctgggcggcggctccgtgcgttttgggccgggggtcgcttttcgcgcgcccagcattcacgggggctccggcggccgcggcgtatccgtgtcctccgcccgctttgtgtcctcgtcctcctcggggggctacggcggcggctacggcggcgtcctgaccgcgtccgacgggctgctggcgggcaacgagaagctaaccatgcagaacctcaacgaccgcctggcctcctacctggacaaggtgcgcgccctggaggcggccaacggcgagctagaggtgaagatccgcgactggtaccagaagcaggggcctgggccctcccgcgactacagccactactacacgaccatccaggacctgcgggacaagattcttggtgccaccattgagaactccaggattgtcctgcagatcgacaacgcccgtctggctgcagatgacttccgaaccaagtttgagacggaacaggctctgcgcatgagcgtggaggccgacatcaacggcctgcgcagggtgctggatgagctgaccctggccaggaccgacctggagatgcagatcgaaggcctgaaggaagagctggcctacctgaagaagaaccatgaggaggaaatcagtacgctgaggggccaagtgggaggccaggtcagtgtggaggtggattccgctccgggcaccgatctcgccaagatcctgagtgacatgcgaagccaatatgaggtcatggccgagcagaaccggaaggatgctgaagcctggttcaccagccggactgaagaattgaaccgggaggtcgctggccacacggagcagctccagatgagcaggtccgaggttactgacctgcggcgcacccttcagggtcttgagattgagctgcagtcacagctgagcatgaaagctgccttggaagacacactggcagaaacggaggcgcgctttggagcccagctggcgcatatccaggcgctgatcagcggtattgaagcccagctggcggatgtgcgagctgatagtgagcggcagaatcaggagtaccagcggctcatggacatcaagtcgcggctggagcaggagattgccacctaccgcagcctgctcgagggacaggaagatcactacaacaatttgtctgcctccaaggtcctctgaggcagcaggctctggggcttctgctgtcctttggagggtgtcttctgggtagagggatgggaaggaagggacccttacccccggctcttctcctgacctgccaataaaaatttatggtccaaggg

SEQ ID NO: 1112 - DNA, 16382 bp, Homo sapiens
ctgcagccatgggtgccctatggagctggtggatactctgggctggagcaaccctcctgtggggattgacccaggaggcttcagtggacctcaagaacactggcagagaggaattcctcacagccttcctgcagaactatcagctggcctacagcaaggcctacccccgcctccttatctccagtctgtcagagagccccgcttcagtctccatcctcagccaggcagacaacacctcaaagaaggtcacagtgaggcccggggagtcggtcatggtcaacatcagtgccaaggctgagatgataggcagcaagatcttccagcatgcggtggtgatccattctgactatgccatctctgtgcaggcactaaatgccaagcctgacacagcggagctgacactgctgcggcccatccaggccctaggcaccgagtattttgtgctcacaccccccggcacctcagccaggaatgtcaaggagtttgccgtggtggccggtgccgcaggtgcctcggtcagtgtcacgctgaaggggtcagtgacattcaatggcaagttctatccagcaggcgatgtcctaagagtgactctacagccctacaatgtggcccagctacagagctcagtggatctctcggggtcaaaggtcacagctagtagccccgtggctgtcctctctggccacagctgtgcgcagaaacatacgacctgcaaccatgtggttgagcagctgctacccacgtctgcctggggcacccactatgtagtacccacgctggcctcccaatctcgctatgatttggccttcgttgtggccagccaggccacaaagctgacctacaaccatgggggtatcactggctcccgtgggctccaggcaggtgatgtggtagagtttgaggtccggccatcctggccactctacctgtctgcaaatgtgggcatccaggtcctgttgtttggcacaggtgccataaggaatgaagtgacttatgacccctacctggtcctgatcccagatgtggcggcctactgcccagcctatgtggtcaagagtgtaccaggctgtgagggcgtggccctggtagtggcacagacgaaggctatcagcgggctgaccatagatgggcatgcagtgggggccaagctcacctgggaggctgtgccaggcagtgagttctcgtatgctgaagtggagctcggcacagctgacatgatccacacggccgaggccaccaccaacttgggactgctcaccttcgggctggccaaggctataggctacgcaacagctgctgattgcggccggactgtactgtccccagtggagccctcctgcgaaggcatgcagtgcgcagccgggcagcgctgccaggtggtaggcgggaaggccgggtgtgtggcggagtccaccgctgtctgccgcgcccagggcgacccccattacaccaccttcgacggccgtcgctacgacatgatgggcacctgttcgtacacgatggtggagctgtgcagcgaggacgacaccctgcccgccttcagcgtggaggccaagaacgagcaccggggcagccgccgcgtctcctacgtgggcctcgtcactgtgcgcgcctacagccactctgtgtcgctgacccgcggtgaagttggcttcgtcctggttgacaaccagcgctcgcgcctgccagtctccctgagtgagggtcgcctgcgtgtgtaccagagcggaccacgggccgtggtggagctggtctttgggctggtggtcacttatgactgggactgccagctggcactcagcctgcctgcacgcttccaagaccaggtgtgcgggctgtgtggcaactataatggtgacccagcagacgacttcctcacgcctgacggggctctggctcctgacgctgtggagttcgcaagtagctggaagctggatgatggggactacctgtgtgaggatggctgccagaacaactgtcccgcctgcaccccaggccaggcccaacactatgagggcgaccgactctgtggcatgctgaccaagctcgatggccccttcgctgtctgccatgacaccctggaccccaggcccttcctggagcagtgtgtatatgacctgtgtgtggtcggtggggagcggctcagcctgtgccgtggcctcagcgcctatgcccaggcctgtctggagcttggcatctcggttggggactggagatcaccagccaactgccccctgtcctgccctgccaacagccgctatgagctctgcggccctgcttgcccgacctcctgcaacggggctgcggcgccgtccaactgctccgggcgcccctgcgtggagggctgcgtgtgcctcccaggcttcgtggccagcggcggcgcctgcgtgccggcctcgtcgtgtggctgcaccttccagggtctccagctcgctccgggccaggaagtgtgggcggacgagttgtgccaaaggcgctgcacctgcaacggcgccacccatcaggtcacctgccgcgacaagcagagctgcccggcgggtgagcgctgcagcgtccagaacggcctcctgggctgctaccccgatcgcttcgggacctgccaggggtccggggacccacactatgtgagcttcgacggccggcgcttcgacttcatgggcacctgcacgtacctgctggtcggctcatgcggccagaacgcagcgctgcctgccttccgggtgctggtggaaaacgagcatcggggcagccagactgtgagctacacgcgcgccgtgcgggtggaggcccgcggggtgaaggtggccgtgcgccgggagtaccccgggcaagtgctggtggatgacgtccttcagtatctgcccttccaagcagcagatgggcaggtgcaggtgttccgacagggcagggatgccgtcgtgcgcacggactttggcctgactgtcacttatgactggaatgcacgagtgactgccaaggtgcccagcagctatgctgaggccctgtgtggactctgtgggaacttcaacggggacccagctgatgacctggctctgcggggtgggggtcaagctgccaatgcactggcctttgggaacagctggcaagaagagacgaggcccggctgtggagcaactgaaccgggtgactgtcccaagctggactccctggtggcccagcagctgcagagcaagaatgagtgtggaatccttgccgaccccaaggggcccttccgggagtgccatagcaagctggacccccagggtgccgtgcgcgactgtgtctatgaccgctgcctgctgccaggccagtctgggccactgtgtgacgcactggccacctatgctgctgcatgccaggctgctggagccacagtgcacccctggaggagtgaagaactttgcccactgagctgcccaccccacagccactatgaggcgtgttcctacggctgcccgctgtcctgtggagacctcccagtgcccgggggctgtggctcagaatgccatgagggctgcgtgtgcgatgagggctttgcgctcagtggtgagtcctgcctgcccctggcctcctgtggctgcgtacaccagggcacctaccacccaccaggccagaccttctaccctggccccggatgtgattccctttgccactgccaggagggcggcctggtgtcctgtgagtcctccagctgcggaccgcacgaggcctgccagccatccggtggcagcttgggctgtgtggccgtgggctctagcacctgccaggcgtcaggagacccccactacaccaccttcgatggccgccgcttcgacttcatgggcacctgcgtgtatgtgctggctcagacctgcggcacccggcctggcctgcatcggtttgccgtcctgcaggagaacgtggcctggggtaatgggcgagtcagtgtgaccagggtgatcacggtccaggtggcaaacttcaccctgcggctggagcagagacagtggaaggtcacggtgaacggtgtggacatgaagctgcccgtggtgctggccaacggccagatccgtgcctcccagcatggttcagatgttgtgattgagaccgacttcggcctgcgtgtggcctacgaccttgtgtactatgtgcgggtcaccgtccccggaaactactaccagcagatgtgtggcctgtgtgggaactacaacggcgaccccaaggatgacttccagaagcccaatggctcacaggcaggcaacgccaatgagttcggcaactcctgggaggaggtggtgcccgactctccctgcctgccgcccaccccttgcccgccggggagcgaggactgtatccccagccacaagtgtcctcccgagctggagaagaagtatcagaaggaggagttctgtgggctcctctccagccccacagggccactgtcctcctgccacaagctggtggatccccagggtcccttgaaagattgcatctttgatctctgcctgggtggtgggaacctgagcattctctgcagcaacatccatgcctacgtgagtgcttgccaggcggctggaggccacgtggagccctggaggactgaaactttctgtcccatggagtgccctccgaacagtcactacgagctctgtgcggacacctgctccctgggctgctcagctctcagtgcccctccacagtgccaggatgggtgtgctgagggctgccagtgtgactccggcttcctctacaatggccaagcctgcgtgcccatccagcaatgcggctgctaccacaatggtgtctactatgagccggagcagacagtcctcattgacaactgtcggcagcagtgcacgtgccatgcgggtaaaggcatggtgtgccaggaacacagctgcaagccggggcaggtgtgccagccctccggaggcatcctgagctgcgtcaccaaagacccgtgccacggcgtgacatgccggccacaggagacatgcaaggagcagggtggccagggcgtgtgcctgcccaactatgaggccacgtgctggctgtggggcgacccacactaccactccttcgatggccggaagtttgacttccagggcacctgtaactatgtgctggcaacaactggctgcccgggggtcagcacccagggcctgacacccttcaccgtcaccaccaagaaccagaaccggggcaaccctgctgtgtcctacgtgagagtcgtcaccgtggctgccctcggcaccaacatctccatccacaaggacgagatcggcaaagtccgggtgaacggtgtgctcacagccttgcctgtctctgtggccgacgggcggatttcagtgacccagggtgcatcgaaggcactgctggtggctgactttggactgcaagtcagctatgactggaactggcgggtagacgtgacgctgcccagcagctatcatggcgcagtgtgcgggctctgcggtaacatggaccgcaaccccaacaatgaccaggtcttccctaatggcacactggctccctccatacccatctggggcggcagctggcgagccccaggctgggacccactgtgttgggacgaatgtcgggggtcctgcccaacgtgccctgaggaccggttggagcagtacgagggccctggcttctgcggacccctggcccccggcacagggggccctttcaccacctgccatgctcatgtgccacctgagagcttcttcaagggctgtgttctggacgtctgcatgggtggtggggaccgtgacattctttgcaaggctctggcttcctatgtggccgcctgccaggctgctggggttgtcatcgaagactggcgggcacaggttggctgtgagatcacctgcccagaaaacagccactatgaggtctgtggcccaccctgcccggccagctgtccgtcccctgcaccccttacgacgccagccgtatgtgagggcccctgtgtggagggctgccagtgcgacgcgggtttcgtgttaagtgctgaccgctgtgttcccctcaacaacggctgcggctgctgggccaatggcacctaccacgaggcgggcagtgagttttgggctgatggcacctgctcccagtggtgtcgctgcgggcctgggggtggctcgctggtctgcacacctgccagctgtgggctgggtgaagtgtgtggcctcctgccatccggccagcacggctgccagcccgtcagcacagctgagtgccaggcgtggggtgacccccattacgtcactctggatgggcaccgattcaatttccaaggcacctgcgagtacctgctgagtgcaccctgccacggaccacccttgggggctgagaacttcactgtcactgtagccaatgagcaccggggcagccaggctgtcagctacacccgcagtgtcaccctgcaaatctacaaccacagcctgacactgagtgcccgctggccccggaagctacaggtggacggcgtgttcgtcactctgcccttccagctggactcgctcctgcacgcacacctgagcggcgccgacgtggtggtgaccacaacctcagggctctcgctggctttcgacggggacagcttcgtgcgcctgcgcgtgccggcggcgtacgcgggctctctctgtggcttatgcgggaactacaaccaggaccccgcagacgacctgaaggcggtgggcgggaagcccgccggatggcaggtgggcggcgcccagggctgcggggaatgtgtgtccaagccatgcccgtcgccgtgcaccccagagcagcaagagtccttcggcggcccggacgcctgcggcgtgatctccgccaccgacggcccgctggcgccctgccacggccttgtgccgcccgcgcagtacttccagggctgcttgctggacgcctgccaagttcagggccatcctggaggcctctgtcctgcagtggccacctacgtggcagcctgtcaggccgctggggcccagctccgcgagtggaggcggccggacttctgtcccttccagtgccctgcccacagccactacgagctctgcggtgactcctgtcctgggagctgcccgagcctgtcggcacccgagggctgtgagtcggcctgccgtgaaggctgtgtctgcgatgctggcttcgtgctcagtggtgacacgtgtgtacctgtgggccagtgtggctgcctccacgatgaccgctactacccactgggccagaccttctaccctggccctgggtgtgattccctttgccgctgccgggagggcggtgaggtgtcctgtgagccctccagctgcggcccgcatgagacctgccggccatccggtggcagcttgggctgcgtggccgtgggctctaccacctgccaggcgtcgggagatccccactacaccaccttcgatggccgccgcttcgacttcatgggcacctgcgtgtatgtgctggctcagacctgcggcacccggcctggcctacatcggtttgccgtcctgcaggagaacgtggcctggggtaatgggcgagtcagtgtgaccagggtgatcacggtccaggtggcaaacttcaccctgcggctggagcagagacagtggaaggtcacggtgaacggtgtggacatgaagctgcccgtggtgctggccaacggccagatccgtgcctcccagcatggttcagatgttgtgattgagaccgacttcggcctgcgtgtggcctacgaccttgtgtactatgtgcgggtcaccgtccctggaaactactaccagctgatgtgtggcctgtgtgggaactacaacggcgaccccaaggatgacttccagaagcccaatggctcgcaggcaggcaacgccaatgagttcggcaactcctgggaggaggtggtgcccgactctccctgcctgccgccgcccacctgcccgccggggagcgagggctgtatccccagcgaggagtgtcctcccgagctggagaagaagtatcagaaggaggagttctgtgggctcctctccagccccacagggccactgtcctcctgccacaagctggtggatccccagggtcccttgaaagattgcatctttgatctctgcctgggtggtgggaacctgagcattctctgcagcaacatccatgcctacgtgagtgcttgccaggcggctggaggccacgtggagccctggaggaatgaaactttctgtcccatggaatgccctcagaacagtcactacgagctctgtgcggacacctgctccctgggctgctcggctctcagtgcccctctgcagtgcccagatgggtgtgctgagggctgccagtgtgactccggcttcctctacaacggccaagcctgcgtgcccatccagcaatgtggctgctaccacaatggtgcctactatgagccggagcagacagtcctcattgacaactgtcggcagcagtgcacgtgccatgcgggtaaagtcgtggtgtgccaggaacacagctgcaagccggggcaggtgtgccagccctccggaggcatcctgagctgcgtcaccaaagacccgtgccacggcgtgacatgccggccacaggagacatgcaaggagcagggtggccagggtgtgtgcctgcccaactatgaggccacgtgctggctgtggggcgacccacactaccactccttcgatggccggaagtttgacttccagggcacctgtaactatgtgctggcaacaactggctgcccgggggtcagcacccagggcctgacacccttcaccgtcaccaccaagaaccagaaccggggcaaccctgctgtatcctacgtgagagtcgtcaccgtggctgccctcggcaccaacatctccatccacaaggacgagatcggcaaagtccgggtgaacggtgtgctcacagccttgcctgtctccgtggccgacgggcggatttcagtggcccagggtgcatcgaaggcactgctggtggctgactttggactgcaagtcagctatgactggaactggcgggtagacgtgacgctccccagcagctatcatggcgcagtgtgcgggctctgcggtaacatggaccgcaaccccaacaatgaccaggtcttccctaatggcacactggctccctccatacccatctggggcggcagctggcgagccccaggctgggacccactgtgttgggacgaatgtcgggggtcctgcccaacgtgccctgaggaccggttggagcagtacgagggccctggcttctgcggacccctggcccccggcacagggggccctttcaccacctgccatgctcatgtgccacctgagagcttcttcaagggctgtgttctggacgtctgcatgggtggtggggaccatgacattctttgcaaggctctggcttcctacgtggccgcctgccaggccgctggggttgtcatcgaagactggcgggcacaggttggctgtgagatcacctgcccagaaaacagccactatgaggtctgtggcccaccctgcccggccagctgtccgtcccctgcaccccttacgacgccagccgtatgtgagggcccctgtgtggagggctgccagtgcgacgcgggtttcgtgttaagtgctgaccgctgtgttcccctcaacaacggctgcggctgctgggccaatggcacctaccacgaggcgggcagtgagttttgggctgatggcacctgctcccagtggtgtcgctgcgggcctgggggtggctcgctggtctgcacacctgccagctgtgggctgggtgaagtgtgtggcctcctgccatccggccagcacggctgccagcccgtcagcacagctgagtgccaggcgtggggtgacccccattacgtcactctggatgggcaccgattcgatttccaaggcacctgcgagtacctgctgagtgcaccctgccacggaccacccttgggggctgagaacttcactgtcactgtagccaatgagcaccggggcagccaggctgtcagctacacccgcagtgtcaccctgcaaatctacaaccacagcctgacactgagtgcccgctggccccggaagctacaggtggacggcgtgttcgtcactctgcccttccagctggactcgctcctgcacgcacacctgagcggcgccgacgtggtggtgaccacaacctcagggctctcgctggctttcgacggggacagcttcgtgcgcctgcgcgtgccggcggcgtacgcgggctctctctgtggcttatgcgggaactacaaccaggaccccgcagacgacctgaaggcggtgggcgggaagcccgccggatggcaggtgggcggcgcccagggctgcggggaatgtgtgtccaagccatgcccgtcgccgtgcaccccagagcagcaagagtccttcggcggcccggacgcctgcggcgtgatctccgccaccgacggcccgctggcgccctgccacggccttgtgccgcccgcgcagtacttccagggctgcttgctggacgcctgccaagttcagggccatcctggaggcctctgtcctgcagtggccacctacgtggcagcctgtcaggccgctggggcccagctccgcgagtggaggcggccggacttctgtcccttccagtgccctgcccacagccactacgagctctgcggtgactcctgtcctgggagctgcccgagcctgtcggcacccgagggctgtgagtcggcctgccgtgaaggctgtgtctgcgatgctggcttcgtgctcagtggtgacacgtgtgtacctgtgggccagtgtggctgcctccacgatgaccgctactacccactgggccagaccttctaccctggccctgggtgtgattccctttgccgctgccgggagggcggtgaggtgtcctgtgagccctccagctgcggcccgcatgagacctgccggccatccggtggcagcttgggctgcgtggccgtgggctctaccacctgccaggcgtcgggagatccccactacaccaccttcgatggccgccgcttcgacttcatgggcacctgcgtgtatgtgctggctcagacctgcggcacccggcctggcctacatcggtttgccgtcctgcaggagaacgtggcctggggtaatgggcgagtcagtgtgaccagggtgatcacggtccaggtggcaaacttcaccctgcggctggagcagagacagtggaaggtcacggtgaacggtgtggacatgaagctgcccgtggtgctggccaacggccagatccgtgcctcccagcatggttcagatgttgtgattgagaccgacttcggcctgcgtgtggcctacgaccttgtgtactatgtgcgggtcaccgtccctggaaactactaccagctgatgtgtggcctgtgtgggaactacaacggcgaccccaaggatgacttccagaagcccaatggctcgcaggcaggcaacgccaatgagttcggcaactcctgggaggaggtggtgcccgactctccctgcctgccgccgcccacctgcccgccggggagcgagggctgtatccccagcgaggagtgtcctcccgagctggagaagaagtatcagaaggaggagttctgtgggctcctctccagccccacagggccactgtcctcctgccacaagctggtggatccccagggtcccttgaaagattgcatctttgatctctgcctgggtggtgggaacctgagcattctctgcagcaacatccatgcctacgtgagtgcttgccaggcggctggaggccacgtggagccctggaggaatgaaactttctgtcccatggaatgccctcagaacagtcactacgagctctgtgcggacacctgctccctgggctgctcggctctcagtgcccctctgcagtgcccagatgggtgtgctgagggctgccagtgtgactccggcttcctctacaacggccaagcctgcgtgcccatccagcaatgtggctgctaccacaatggtgtctactatgagccggagcagacagtcctcattgacaactgtcggcagcagtgcacgtgccatgtgggtaaagtcgtggtgtgccaggaacacagctgcaagccggggcaggtgtgccagccctccggaggcatcctgagctgcgtcaacaaagacccgtgccacggcgtgacatgccggccacaggagacatgcaaggagcagggtggccagggtgtgtgcctgcccaactatgaggccacgtgctggctgtggggcgacccacactaccactccttcgatggccggaagtttgacttccagggcacctgtaactatgtgctggcaacaactggctgcccgggggtcagcacccagggcctgacacccttcaccgtcaccaccaagaaccagaaccggggcaaccctgctgtatcctacgtgagagtcgtcaccgtggctgccctcggcaccaacatctccatccacaaggacgagatcggcaaagtccgggtgaacggtgtgctcacagccttgcctgtctccgtggccgacgggcggatttcagtggcccagggtgcatcgaaggcactgctggtggctgactttggactgcaagtcagctatgactggaactggcgggtagacgtgacgctccccagcagctatcatggcgcagtgtgcgggctctgcggtaacatggaccgcaaccccaacaatgaccaggtcttccctaatggcacactggctccctccatacccatctggggcggcagctggcgagccccaggctgggacccactgtgttgggacgaatgtcgggggtcctgcccaacgtgccctgaggaccggttggagcagtacgaggggcctggcttctgcggacccctggcatctggcacagggggccccttcaccacctgccatgctcatgtgccacctgagagcttcttcaagggctgtgttctggacgtctgcatgggtggtggggaccatgacattctttgcaaggctctggcttcctacgtggccgcctgccaggccgctggggttgtcatcgaagactggcgggcacaggttggctgtgagatcacctgcccagaaaacagccactatgaggtctgtggcccaccctgcccggccagctgtccgtcccctgcaccccttacgacgccagccgtatgtgagggcccctgtgtggagggctgccagtgcgacgcgggtttcgtgttaagtgctgaccgctgtgttcccctcaacaacggctgcggctgctgggccaatggcacctaccacgaggcgggcagtgagttttgggctgatggcacctgctcccagtggtgtcgctgcgggcctgggggtggctcgctggtctgcacacctgccagctgtgggctgggtgaagtgtgtggcctcctgccatccggccagcacagctgccagcccgtcagcacagctgagtgccaggcgtggggtgacccccattacgtcactctggatgggcaccgattcgatttccaaggcacctgcgagtacctgctgagtgcaccctgccacggaccacccttgggggctgagaacttcactgtcactgtagccaatgagcaccggggcagccaggctgtcagctacacccgcagtgtcaccctgcaaatctacaaccacagcctgacactgagtgcccgctggccccggaagctacaggtcgacggcgtgttcgtggctctgcctttccagctggactcgctcctgcacgcacacctgagcggcgccgacgtggtggtgaccacaacctcagggctctcgctggctttcgatggggacagcttcgtgcgcctgcgcgtgccggcggcgtacgcggcctctctctgtggcttatgcgggaactacaaccaggaccccgcagacgacctgaaggctgtgggcgggaagcccgctggatggcaggtgggcggggcccagggctgcggggaatgtgtgtccaagccatgcccgtcgccgtgcaccccagagcagcaggagtccttcggcggcccggacgcctgcggcgtgatctccgccaccgacggcccgctggcaccctgccacggccttgtgccgcccgcgcagtacttccagggctgcttgctggacgcctgccaagttcagggccatcctggaggcctctgtcctgcagtggctacctacgtggcagcctgtcaggccgctggggcccagctcggcgagtggaggcggccggacttctgtcccttgcagtgccctgcccacagccactatgagctctgcggtgactcctgccctgtgagctgcccgagcctctcagcacccgagggctgtgagtcggcctgccgtgaaggctgtgtctgcgatgctggcttcgtactcagtggtgacacctgcgtacccgtgggccagtgtggctgcctccatgatggccgctactacccactgggcgaggtcttctacccgggccctgagtgtgagcgacgctgtgagtgtgggccaggtggccatgtcacctgccaggagggcgcagcctgtgggccccatgaggagtgccggttagaggatggtgtccaggcctgtcatgccacaggctgtggccgctgcctggccaacgggggcatccactacatcacccttgatggccgtgtctacgacctgcatggctcctgctcctatgtcttggcccaagtctgccacccaaagcctggggacgaggacttttccatcgtgcttgagaagaatgcagctggacatctccaacgcctcctggttactgtggctggccaggttgtgagcctagctcaggggcagcaggtcaccgtggacggcgaggctgtggccctgcctgtggctgtgggccgcgtgcgggtgaccgccgagggccgaaacatggttctgcagacgaccaaggggctgcggcttctctttgatggcgatgcccacctcctcatgtccatccccagccccttccgtggacggctctgtggcctctgtgggaacttcaatggcaactggagtgacgactttgtcctgcccaatggctcagcagcgtccagtgtggagaccttcggggctgcatggcgggtgcccggctcctccaagggctgtggcgagggctgcgggccccaaggctgcccagtgtgcttggcagaggagactgcaccctatgagagcaacgaggcctgcgggcagctccggaacccccagggccccttcgcgacctgccaggcggtgctgagtccctctgagtacttccgccaatgcgtatacgacctgtgcgcgcaaaagggtgacaaagccttcctgtgccgcagcctggcagcctacacggcggcctgtcaggcagctggcgtggccgtgaagccctggaggacagacagcttctgcccgctccattgccccgcccacagccactactccatctgcactcgcacctgccagggatcctgtgcggctctctccggcctcacgggctgcaccacccgctgttttgagggctgtgagtgcgacgaccgcttcctgctttcccagggtgtctgcatccctgtccaagattgtggctgcacccataatggccgatacttgccggtaaactcctccctgctgacctcagactgcagcgagcgctgttcctgttcctcaagctctggcctgacatgccaggccgctggctgcccaccaggccgtgtatgtgaggtcaaggctgaagcccggaactgctgggccacccgtggtctctgtgtcctgtctgtgggtgccaacctcaccacctttgatggggcccgtggtgccaccacctctcctggtgtctatgagctctcttcccgctgcccaggactacagaataccatcccctggtaccgtgtagttgccgaagtccagatctgccatggcaaaacggaggctgtgggccaggtccacatcttcttccaggatgggatggtgacgttgactccaaacaagggtgtgtgggtgaatggtctccgagtggatctcccagctgagaagttagcatctgtgtccgtgagtcgtacacctgatggctccctgctagtccgccagaaggcaggggtccaggtgtggcttggagccaatgggaaggtggctgtgattgtcagcaatgaccatgctgggaaactgtgtggggcctgtggaaactttgacggggaccagaccaatgattggcatgactcccaggagaagccagcgatggagaaatggagagcgcaggacttctccccatgttatggctgatcagtcatccaccaggaacgaagatttcctgaagaagacctggtccctctggaggttgcggtggctgaaggatgcatcatgtgctcctaccctgctctaccgcttttctgggtcacagaggccaaatgtgagagcattgaataaatatcttaagct

SEQ ID NO: 1113 - DNA, 3143 bp, Homo sapiens
gaattcatgtcttacggtcaagggggaggctgccagagggtttgtcactgctgttgctcctccgcctcagcgagtccagcccgggcctagtcggtcgcctgcctttctcatggccgttaccctcaggccgccacagccgccgaccgggagaggcgcgcgccatggcctctggagccgattcaaaaggtgatgatttatcaacagccattctcaaacagaagaaccgacccaatcggttaattgttgatgaagccatcaatgaagataacagcgtggtgtccttgtcccagcccaagatggatgaactgcagttgttccgaggtgacacggtgttgctaaaaggaaagaaaagacgggaagctgtatgcattgttctttctgatgacacgtgttctgatgagaagattcgaatgaatagagttgttcggaataacctccgagttcgcctaggagatgtcatcagcatccagccatgccctgatgtaaagtatggcaaacgtatccacgttctacccatcgatgacacagtggaaggcatcactggcaatctctttgaggtataccttaagccgtacttcctggaagcttatcggcccatccgtaaaggagatatttttcttgtccggggtgggatgcgtgctgtggagttcaaagttgtagagacagatcccagcccttactgtattgttgctccagacacagtgatccactgtgagggggagccaatcaaacgagaggatgaggaggaatccttgaatgaagtaggctatgatgacgtcggtggttgcaggaagcagctagctcagataaaggagatggtggagctgccactgagacatcctgcgctcttcaaggcgattggtgtaaagcctcctcggggaatcttgttgtatgggcctcctgggacagggaagaccctgattgctcgagctgtggcaaatgaaactggagccttcttctttctgatcaatggtcctgaaatcatgagcaaattggctggtgagtctgagagcaaccttcgtaaagcctttgaggaagctgaaaagaatgctcctgctatcatcttcatcgatgagcttgatgccattgcacccaaaagagagaaaactcatggggaagtggagcgtcgcatcgtgtctcagttgttgaccctcatggatggcctaaagcagagagcacatgtgatagttatggcagcaaccaatagacccaacagcattgacccagccctacggcgatttggtcgctttgacagagaggtagatattggaatacctgatgctacaggacgtttggagattcttcagatccataccaagaacatgaaactggcagatgatgtggacttggaacaggtagccaatgagactcatggtcatgttggtgctgatttggcagccctatgttcagaggctgctctgcaggccatccggaaaaaaatggacctcattgacctagaagatgagaccattgatgctgaggtcatgaattccctggcagttactatggatgacttccggtgggctttgagtcaaagcaacccatcagcacttcgggaaactgtggtagaggtgccacaagtaacctgggaagatattggaggcctggaggatgtcaaacgtgagcttcaggagttggttcagtaccccgtggaacatccagacaaattcctcaaatttggcatgactccctccaaaggtgttcttttctatggacctcctggctgtgggaaaaccttactggctaaagccattgctaatgaatgccaggccaacttcatctccatcaagggtcctgagctgcttaccatgtggtttggggaatctgaggccaatgtccgggaaatttttgacaaggcacggcaagctgccccctgtgtactcttctttgatgagttagattcaattgccaaggctcgtggtggtaatattggagatggtggtggagctgctgaccgagtcatcaatcagatcttgacagaaatggatggcatgtctacaaaaaagaatgtgtttatcattggagctaccaacaggcctgacatcattgatcctgctatcctaagacctggccgtctagatcagctcatttatatcccacttcctgatgagaagtcccgtgttgccatcctaaaagccaatctgcgaaagtccccagttgccaaggatgtggatttggagttcctggctaagatgactaatggcttttctggagctgatttgacagaaatttgccaacgggcttgtaaactggccattcgtgaatctattgagagtgagattaggcgagaacgagagaggcagacaaatccatcggctatggaggtagaagaggatgatccagtgcctgagatccgcagagatcactttgaggaagccatgcgttttgcccgacgttctgtgagcgataatgacattcggaagtatgaaatgttcgcccagacactgcagcagagtcgaggttttggcagcttcagattcccttcagggaaccagggtggagctggtcccagccagggcagtggaggtggcacaggtggcagtgtgtacacagaagacaatgacgatgacctgtatggctaagtgatgtgccagcatgcagcgagctggcctggctggaccttgttccctggggagggggcgcttcgcaagagggcccaggggtgtgcccatggcctgctccattcctcagtctgaacagttcagcccagtcagactctggacaggggtttcctgttgcaaaaaaaaaaattacaaaagcgataaaataaaagtgattttcatttgggaggtgaagagtgaattaccagcaaggaattgggtcttgggcccacacggtttctgtcgtagtttggggtggtgcaggtaacctgtgtggtgtgaaccaagcattgccaccaccatcaccacagtaaagcatctatactcaatgctgtccaagtcctctcttaccctagccaacctgggtaggtggatgaggggcctcagtttgctgggtgtttatatagaaagtaggttgatttttattttacatgcttttgagttacgttggaagactaatcataagcagtttctaaaccaaaaaaaagaaaaaaaaaaaaaaagacatgttgtaaaaggacaataaatgttgggtcaaaatgg

SEQ ID NO: 1114 - DNA, 3195 bp, Homo sapiens
ctgccactgccacctcgcggatcaggagccagcgttgttcgcccgacgcctcgctgccggtgggaggaagcgagagggaagccgcttgcgggtttgtcgccgctgctcgcccaccgcctggaagagccgagccccggcccagtcggtcgcttgccaccgctcgtagccgttacccgcgggccgccacagccgccggccgggagaggcgcgcgccatggcttctggagccgattcaaaaggtgatgacctatcaacagccattctcaaacagaagaaccgtcccaatcggttaattgttgatgaagccatcaatgaggacaacagtgtggtgtccttgtcccagcccaagatggatgaattgcagttgttccgaggtgacacagtgttgctgaaaggaaagaagagacgagaagctgtttgcatcgtcctttctgatgatacttgttctgatgagaagattcggatgaatagagttgttcggaataaccttcgtgtacgcctaggggatgtcatcagcatccagccatgccctgatgtgaagtacggcaaacgtatccatgtgctgcccattgatgacacagtggaaggcattactggtaatctcttcgaggtataccttaagccgtacttcctggaagcgtatcgacccatccggaaaggagacatttttcttgtccgtggtgggatgcgtgctgtggagttcaaagtggtggaaacagatcctagcccttattgcattgttgctccagacacagtgatccactgcgaaggggagcctatcaaacgagaggatgaggaagagtccttgaatgaagtagggtatgatgacattggtggctgcaggaagcagctagctcagataaaggagatggtggaactgcccctgagacatcctgccctctttaaggcaattggtgtgaagcctcctagaggaatcctgctttacggacctcctggaacaggaaagaccctgattgctcgagctgtagcaaatgagactggagccttcttcttcttgatcaatggtcctgagatcatgagcaaattggctggtgagtctgagagcaaccttcgtaaagcctttgaggaggctgagaagaatgctcctgccatcatcttcattgatgagctagatgccatcgctcccaaaagagagaaaactcatggcgaggtggagcggcgcattgtatcacagttgttgaccctcatggatggcctaaagcagagggcacatgtgattgttatggcagcaaccaacagacccaacagcattgacccagctctacggcgatttggtcgctttgacagggaggtagatattggaattcctgatgctacaggacgcttagagattcttcagatccataccaagaacatgaagctggcagatgatgtggacctggaacaggtagccaatgagactcacgggcatgtgggtgctgacttagcagccctgtgctcagaggctgctctgcaagccatccgcaagaagatggatctcattgacctagaggatgagaccattgatgccgaggtcatgaactctctagcagttactatggatgacttccggtgggccttgagccagagtaacccatcagcactgcgggaaaccgtggtagaggtgccacaggtaacctgggaagacatcgggggcctagaggatgtcaaacgtgagctacaggagctggtccagtatcctgtggagcacccagacaaattcctgaagtttggcatgacaccttccaagggagttctgttctatggacctcctggctgtgggaaaactttgttggccaaagccattgctaatgaatgccaggccaacttcatctccatcaagggtcctgagctgctcaccatgtggtttggggagtctgaggccaatgtcagagaaatctttgacaaggcccgccaagctgccccctgtgtgctattctttgatgagctggattcgattgccaaggctcgtggaggtaacattggagatggtggtggggctgctgaccgagtcatcaaccagatcctgacagaaatggatggcatgtccacaaaaaaaaatgtgttcatcattggcgctaccaaccggcctgacatcattgatcctgccatcctcagacctggccgtcttgatcagctcatctacatcccacttcctgatgagaagtcccgtgttgccatcctcaaggctaacctgcgcaagtccccagttgccaaggatgtggacttggagttcctggctaaaatgactaatggcttctctggagctgacctgacagagatttgccagcgtgcttgcaagctggccatccgtgaatccatcgagagtgagattaggcgagaacgagagaggcagacaaacccatcagccatggaggtagaagaggatgatccagtgcctgagatccgtcgagatcactttgaagaagccatgcgctttgcgcgccgttctgtcagtgacaatgacattcggaagtatgagatgtttgcccagacccttcagcagagtcggggctttggcagcttcagattcccttcagggaaccagggtggagctggccccagtcagggcagtggaggcggcacaggtggcagtgtatacacagaagacaatgatgatgacctgtatggctaagtggtggtggccagcgtgcagtgagctggcctgcctggaccttgttccctgggggtgggggcgcttgcccaggagagggaccaggggtgcgcccacagcctgctccattctccagtctgaacagttcagctacagtctgactctggacagggggtttctgttgcaaaaatacaaaacaaaagcgataaaataaaagcgattttcatttggtaggcggagagtgaattaccaacagggaattgggccttgggcctatgccatttctgttgtagtttggggcagtgcaggggacctgtgtggggtgtgaaccaaggcactactgccacctgccacagtaaagcatctgcacttgactcaatgctgcccgagccctcccttccccctatccaacctgggtaggtgggtaggggccacagttgctggatgtttatatagagagtaggttgatttattttacatgcttttgagttaatgttggaaaactaatcacaagcagtttctaaaccaaaaaatgacatgttgtaaaaggacaataaacgttgggtcaaaatggagcctga

SEQ ID NO: 1115 - protein, 400 aa, Homo sapiens
MTSYSYRQSSATSSFGGLGGGSVRFGPGVAFRAPSIHGGSGGRGVSVSSARFVSSSSSGGYGGGYGGVLTASDGLLAGNEKLTMQNLNDRLASYLDKVRALEAANGELEVKIRDWYQKQGPGPSRDYSHYYTTIQDLRDKILGATIENSRIVLQIDNARLAADDFRTKFETEQALRMSVEADINGLRRVLDELTLARTDLEMQIEGLKEELAYLKKNHEEEISTLRGQVGGQVSVEVDSAPGTDLAKILSDMRSQYEVMAEQNRKDAEAWFTSRTEELNREVAGHTEQLQMSRSEVTDLRRTLQGLEIELQSQLSMKAALEDTLAETEARFGAQLAHIQALISGIEAQLADVRADSERQNQEYQRLMDIKSRLEQEIATYRSLLEGQEDHYNNLSASKVL

SEQ ID NO: 1116 - protein, 5405 aa, Homo sapiens
MGALWSWWILWAGATLLWGLTQEASVDLKNTGREEFLTAFLQNYQLAYSKAYPRLLISSLSESPASVSILSQADNTSKKVTVRPGESVMVNISAKAEMIGSKIFQHAVVIHSDYAISVQALNAKPDTAELTLLRPIQALGTEYFVLTPPGTSARNVKEFAVVAGAAGASVSVTLKGSVTFNGKFYPAGDVLRVTLQPYNVAQLQSSVDLSGSKVTASSPVAVLSGHSCAQKHTTCNHVVEQLLPTSAWGTHYVVPTLASQSRYDLAFVVASQATKLTYNHGGITGSRGLQAGDVVEFEVRPSWPLYLSANVGIQVLLFGTGAIRNEVTYDPYLVLIPDVAAYCPAYVVKSVPGCEGVALVVAQTKAISGLTIDGHAVGAKLTWEAVPGSEFSYAEVELGTADMIHTAEATTNLGLLTFGLAKAIGYATAADCGRTVLSPVEPSCEGMQCAAGQRCQVVGGKAGCVAESTAVCRAQGDPHYTTFDGRRYDMMGTCSYTMVELCSEDDTLPAFSVEAKNEHRGSRRVSYVGLVTVRAYSHSVSLTRGEVGFVLVDNQRSRLPVSLSEGRLRVYQSGPRAVVELVFGLVVTYDWDCQLALSLPARFQDQVCGLCGNYNGDPADDFLTPDGALAPDAVEFASSWKLDDGDYLCEDGCQNNCPACTPGQAQHYEGDRLCGMLTKLDGPFAVCHDTLDPRPFLEQCVYDLCVVGGERLSLCRGLSAYAQACLELGISVGDWRSPANCPLSCPANSRYELCGPACPTSCNGAAAPSNCSGRPCVEGCVCLPGFVASGGACVPASSCGCTFQGLQLAPGQEVWADELCQRRCTCNGATHQVTCRDKQSCPAGERCSVQNGLLGCYPDRFGTCQGSGDPHYVSFDGRRFDFMGTCTYLLVGSCGQNAALPAFRVLVENEHRGSQTVSYTRAVRVEARGVKVAVRREYPGQVLVDDVLQYLPFQAADGQVQVFRQGRDAVVRTDFGLTVTYDWNARVTAKVPSSYAEALCGLCGNFNGDPADDLALRGGGQAANALAFGNSWQEETRPGCGATEPGDCPKLDSLVAQQLQSKNECGILADPKGPFRECHSKLDPQGAVRDCVYDRCLLPGQSGPLCDALATYAAACQAAGATVHPWRSEELCPLSCPPHSHYEACSYGCPLSCGDLPVPGGCGSECHEGCVCDEGFALSGESCLPLASCGCVHQGTYHPPGQTFYPGPGCDSLCHCQEGGLVSCESSSCGPHEACQPSGGSLGCVAVGSSTCQASGDPHYTTFDGRRFDFMGTCVYVLAQTCGTRPGLHRFAVLQENVAWGNGRVSVTRVITVQVANFTLRLEQRQWKVTVNGVDMKLPVVLANGQIRASQHGSDVVIETDFGLRVAYDLVYYVRVTVPGNYYQQMCGLCGNYNGDPKDDFQKPNGSQAGNANEFGNSWEEVVPDSPCLPPTPCPPGSEDCIPSHKCPPELEKKYQKEEFCGLLSSPTGPLSSCHKLVDPQGPLKDCIFDLCLGGGNLSILCSNIHAYVSACQAAGGHVEPWRTETFCPMECPPNSHYELCADTCSLGCSALSAPPQCQDGCAEGCQCDSGFLYNGQACVPIQQCGCYHNGVYYEPEQTVLIDNCRQQCTCHAGKGMVCQEHSCKPGQVCQPSGGILSCVTKDPCHGVTCRPQETCKEQGGQGVCLPNYEATCWLWGDPHYHSFDGRKFDFQGTCNYVLATTGCPGVSTQGLTPFTVTTKNQNRGNPAVSYVRVVTVAALGTNISIHKDEIGKVRVNGVLTALPVSVADGRISVTQGASKALLVADFGLQVSYDWNWRVDVTLPSSYHGAVCGLCGNMDRNPNNDQVFPNGTLAPSIPIWGGSWRAPGWDPLCWDECRGSCPTCPEDRLEQYEGPGFCGPLAPGTGGPFTTCHAHVPPESFFKGCVLDVCMGGGDRDILCKALASYVAACQAAGVVIEDWRAQVGCEITCPENSHYEVCGPPCPASCPSPAPLTTPAVCEGPCVEGCQCDAGFVLSADRCVPLNNGCGCWANGTYHEAGSEFWADGTCSQWCRCGPGGGSLVCTPASCGLGEVCGLLPSGQHGCQPVSTAECQAWGDPHYVTLDGHRFNFQGTCEYLLSAPCHGPPLGAENFTVTVANEHRGSQAVSYTRSVTLQIYNHSLTLSARWPRKLQVDGVFVTLPFQLDSLLHAHLSGADVVVTTTSGLSLAFDGDSFVRLRVPAAYAGSLCGLCGNYNQDPADDLKAVGGKPAGWQVGGAQGCGECVSKPCPSPCTPEQQESFGGPDACGVISATDGPLAPCHGLVPPAQYFQGCLLDACQVQGHPGGLCPAVATYVAACQAAGAQLREWRRPDFCPFQCPAHSHYELCGDSCPGSCPSLSAPEGCESACREGCVCDAGFVLSGDTCVPVGQCGCLHDDRYYPLGQTFYPGPGCDSLCRCREGGEVSCEPSSCGPHETCRPSGGSLGCVAVGSTTCQASGDPHYTTFDGRRFDFMGTCVYVLAQTCGTRPGLHRFAVLQENVAWGNGRVSVTRVITVQVANFTLRLEQRQWKVTVNGVDMKLPVVLANGQIRASQHGSDVVIETDFGLRVAYDLVYYVRVTVPGNYYQLMCGLCGNYNGDPKDDFQKPNGSQAGNANEFGNSWEEVVPDSPCLPPPTCPPGSEGCIPSEECPPELEKKYQKEEFCGLLSSPTGPLSSCHKLVDPQGPLKDCIFDLCLGGGNLSILCSNIHAYVSACQAAGGHVEPWRNETFCPMECPQNSHYELCADTCSLGCSALSAPLQCPDGCAEGCQCDSGFLYNGQACVPIQQCGCYHNGAYYEPEQTVLIDNCRQQCTCHAGKVVVCQEHSCKPGQVCQPSGGILSCVTKDPCHGVTCRPQETCKEQGGQGVCLPNYEATCWLWGDPHYHSFDGRKFDFQGTCNYVLATTGCPGVSTQGLTPFTVTTKNQNRGNPAVSYVRVVTVAALGTNISIHKDEIGKVRVNGVLTALPVSVADGRISVAQGASKALLVADFGLQVSYDWNWRVDVTLPSSYHGAVCGLCGNMDRNPNNDQVFPNGTLAPSIPIWGGSWRAPGWDPLCWDECRGSCPTCPEDRLEQYEGPGFCGPLAPGTGGPFTTCHAHVPPESFFKGCVLDVCMGGGDHDILCKALASYVAACQAAGVVIEDWRAQVGCEITCPENSHYEVCGPPCPASCPSPAPLTTPAVCEGPCVEGCQCDAGFVLSADRCVPLNNGCGCWANGTYHEAGSEFWADGTCSQWCRCGPGGGSLVCTPASCGLGEVCGLLPSGQHGCQPVSTAECQAWGDPHYVTLDGHRFDFQGTCEYLLSAPCHGPPLGAENFTVTVANEHRGSQAVSYTRSVTLQIYNHSLTLSARWPRKLQVDGVFVTLPFQLDSLLHAHLSGADVVVTTTSGLSLAFDGDSFVRLRVPAAYAGSLCGLCGNYNQDPADDLKAVGGKPAGWQVGGAQGCGECVSKPCPSPCTPEQQESFGGPDACGVISATDGPLAPCHGLVPPAQYFQGCLLDACQVQGHPGGLCPAVATYVAACQAAGAQLREWRRPDFCPFQCPAHSHYELCGDSCPGSCPSLSAPEGCESACREGCVCDAGFVLSGDTCVPVGQCGCLHDDRYYPLGQTFYPGPGCDSLCRCREGGEVSCEPSSCGPHETCRPSGGSLGCVAVGSTTCQASGDPHYTTFDGRRFDFMGTCVYVLAQTCGTRPGLHRFAVLQENVAWGNGRVSVTRVITVQVANFTLRLEQRQWKVTVNGVDMKLPVVLANGQIRASQHGSDVVIETDFGLRVAYDLVYYVRVTVPGNYYQLMCGLCGNYNGDPKDDFQKPNGSQAGNANEFGNSWEEVVPDSPCLPPPTCPPGSEGCIPSEECPPELEKKYQKEEFCGLLSSPTGPLSSCHKLVDPQGPLKDCIFDLCLGGGNLSILCSNIHAYVSACQAAGGHVEPWRNETFCPMECPQNSHYELCADTCSLGCSALSAPLQCPDGCAEGCQCDSGFLYNGQACVPIQQCGCYHNGVYYEPEQTVLIDNCRQQCTCHVGKVVVCQEHSCKPGQVCQPSGGILSCVNKDPCHGVTCRPQETCKEQGGQGVCLPNYEATCWLWGDPHYHSFDGRKFDFQGTCNYVLATTGCPGVSTQGLTPFTVTTKNQNRGNPAVSYVRVVTVAALGTNISIHKDEIGKVRVNGVLTALPVSVADGRISVAQGASKALLVADFGLQVSYDWNWRVDVTLPSSYHGAVCGLCGNMDRNPNNDQVFPNGTLAPSIPIWGGSWRAPGWDPLCWDECRGSCPTCPEDRLEQYEGPGFCGPLASGTGGPFTTCHAHVPPESFFKGCVLDVCMGGGDHDILCKALASYVAACQAAGVVIEDWRAQVGCEITCPENSHYEVCGPPCPASCPSPAPLTTPAVCEGPCVEGCQCDAGFVLSADRCVPLNNGCGCWANGTYHEAGSEFWADGTCSQWCRCGPGGGSLVCTPASCGLGEVCGLLPSGQHSCQPVSTAECQAWGDPHYVTLDGHRFDFQGTCEYLLSAPCHGPPLGAENFTVTVANEHRGSQAVSYTRSVTLQIYNHSLTLSARWPRKLQVDGVFVALPFQLDSLLHAHLSGADVVVTTTSGLSLAFDGDSFVRLRVPAAYAASLCGLCGNYNQDPADDLKAVGGKPAGWQVGGAQGCGECVSKPCPSPCTPEQQESFGGPDACGVISATDGPLAPCHGLVPPAQYFQGCLLDACQVQGHPGGLCPAVATYVAACQAAGAQLGEWRRPDFCPLQCPAHSHYELCGDSCPVSCPSLSAPEGCESACREGCVCDAGFVLSGDTCVPVGQCGCLHDGRYYPLGEVFYPGPECERRCECGPGGHVTCQEGAACGPHEECRLEDGVQACHATGCGRCLANGGIHYITLDGRVYDLHGSCSYVLAQVCHPKPGDEDFSIVLEKNAAGHLQRLLVTVAGQVVSLAQGQQVTVDGEAVALPVAVGRVRVTAEGRNMVLQTTKGLRLLFDGDAHLLMSIPSPFRGRLCGLCGNFNGNWSDDFVLPNGSAASSVETFGAAWRVPGSSKGCGEGCGPQGCPVCLAEETAPYESNEACGQLRNPQGPFATCQAVLSPSEYFRQCVYDLCAQKGDKAFLCRSLAAYTAACQAAGVAVKPWRTDSFCPLHCPAHSHYSICTRTCQGSCAALSGLTGCTTRCFEGCECDDRFLLSQGVCIPVQDCGCTHNGRYLPVNSSLLTSDCSERCSCSSSSGLTCQAAGCPPGRVCEVKAEARNCWATRGLCVLSVGANLTTFDGARGATTSPGVYELSSRCPGLQNTIPWYRVVAEVQICHGKTEAVGQVHIFFQDGMVTLTPNKGVWVNGLRVDLPAEKLASVSVSRTPDGSLLVRQKAGVQVWLGANGKVAVIVSNDHAGKLCGACGNFDGDQTNDWHDSQEKPAMEKWRAQDFSPCYG

SEQ ID NO: 1117 - protein, 806 aa, Homo sapiens
MASGADSKGDDLSTAILKQKNRPNRLIVDEAINEDNSVVSLSQPKMDELQLFRGDTVLLKGKKRREAVCIVLSDDTCSDEKIRMNRVVRNNLRVRLGDVISIQPCPDVKYGKRIHVLPIDDTVEGITGNLFEVYLKPYFLEAYRPIRKGDIFLVRGGMRAVEFKVVETDPSPYCIVAPDTVIHCEGEPIKREDEEESLNEVGYDDVGGCRKQLAQIKEMVELPLRHPALFKAIGVKPPRGILLYGPPGTGKTLIARAVANETGAFFFLINGPEIMSKLAGESESNLRKAFEEAEKNAPAIIFIDELDAIAPKREKTHGEVERRIVSQLLTLMDGLKQRAHVIVMAATNRPNSIDPALRRFGRFDREVDIGIPDATGRLEILQIHTKNMKLADDVDLEQVANETHGHVGADLAALCSEAALQAIRKKMDLIDLEDETIDAEVMNSLAVTMDDFRWALSQSNPSALRETVVEVPQVTWEDIGGLEDVKRELQELVQYPVEHPDKFLKFGMTPSKGVLFYGPPGCGKTLLAKAIANECQANFISIKGPELLTMWFGESEANVREIFDKARQAAPCVLFFDELDSIAKARGGNIGDGGGAADRVINQILTEMDGMSTKKNVFIIGATNRPDIIDPAILRPGRLDQLIYIPLPDEKSRVAILKANLRKSPVAKDVDLEFLAKMTNGFSGADLTEICQRACKLAIRESIESEIRRERERQTNPSAMEVEEDDPVPEIRRDHFEEAMRFARRSVSDNDIRKYEMFAQTLQQSRGFGSFRFPSGNQGGAGPSQGSGGGTGGSVYTEDNDDDLYG

SEQ ID NO: 1118 - protein, 806 aa, Homo sapiens
MASGADSKGDDLSTAILKQKNRPNRLIVDEAINEDNSVVSLSQPKMDELQLFRGDTVLLKGKKRREAVCIVLSDDTCSDEKIRMNRVVRNNLRVRLGDVISIQPCPDVKYGKRIHVLPIDDTVEGITGNLFEVYLKPYFLEAYRPIRKGDIFLVRGGMRAVEFKVVETDPSPYCIVAPDTVIHCEGEPIKREDEEESLNEVGYDDIGGCRKQLAQIKEMVELPLRHPALFKAIGVKPPRGILLYGPPGTGKTLIARAVANETGAFFFLINGPEIMSKLAGESESNLRKAFEEAEKNAPAIIFIDELDAIAPKREKTHGEVERRIVSQLLTLMDGLKQRAHVIVMAATNRPNSIDPALRRFGRFDREVDIGIPDATGRLEILQIHTKNMKLADDVDLEQVANETHGHVGADLAALCSEAALQAIRKKMDLIDLEDETIDAEVMNSLAVTMDDFRWALSQSNPSALRETVVEVPQVTWEDIGGLEDVKRELQELVQYPVEHPDKFLKFGMTPSKGVLFYGPPGCGKTLLAKAIANECQANFISIKGPELLTMWFGESEANVREIFDKARQAAPCVLFFDELDSIAKARGGNIGDGGGAADRVINQILTEMDGMSTKKNVFIIGATNRPDIIDPAILRPGRLDQLIYIPLPDEKSRVAILKANLRKSPVAKDVDLEFLAKMTNGFSGADLTEICQRACKLAIRESIESEIRRERERQTNPSAMEVEEDDPVPEIRRDHFEEAMRFARRSVSDNDIRKYEMFAQTLQQSRGFGSFRFPSGNQGGAGPSQGSGGGTGGSVYTEDNDDDLYG

SEQ ID NO: 1119 - DNA, 1341 bp, Homo sapiens
atgtcctgcggtaacgccaagatcaactctcccgcgccgtccttcgaggaggtggcgctcatgcccaacggcagcttcaagaagatcagcctctcctcctacaagggcaagtgggtcgtgctcttcttctacccgctcgacttcaccttcgtgtgcccgacagaggtcatcgcgttctccgacagcgtgagtcgcttcaacgagctcaactgcgaggtcctcgcgtgctcgatagacagcgagtacgcgcacctgcagtggacgctgcaggaccgcaagaagggcggcctcgggaccatggcgatcccaatgctagccgacaagaccaagagcatcgctcgttcctacggcgtgctggaggagagccagggcgtggcctaccgcggtctcttcatcatcgacccccatggcatgctgcgtcagatcaccgtcaatgacatgccggtgggccgcagcgtggaggaggttctacgcctgctggaggcttttcagttcgtggagaagcacggcgaggtgtgccccgcgaactggaagaagggcgcccccacgatgaagccggaaccgaatgcgtctgtcgagggatacttcagcaagcagtctagagaattcatggcaggtgtgagtgcctgtataaaatattctatgtttaccttcaacttcttgttctggctatgtggtatcttgatcctagcattagcaatatgggtacgagtaagcaatgactctcaagcaatttttggttctgaagatgtaggctctagctcctacgttgctgtggacatattgattgctgtaggtgccatcatcatgattctgggcttcctgggatgctgcggtgctataaaagaaagtcgctgcatgcttctgttgtttttcataggcttgcttctgatcctgctcctgcaggtggcgacaggtatcctaggagctgttttcaaatctaagtctgatcgcattgtgaatgaaactctctatgaaaacacaaagcttttgagcgccacaggggaaagtgaaaaacaattccaggaagccataattgtgtttcaagaagagtttaaatgctgcggtttggtcaatggagctgctgattggggaaataattttcaacactatcctgaattatgtgcctgtctagataagcagagaccatgccaaagctataatggaaaacaagtttacaaagagacctgtatttctttcataaaagacttcttggcaaaaaatttgattatagttattggaatatcatttggactggcagttattgagatactgggtttggtgttttctatggtcctgtattgccagatcgggaacaaacaccatcaccatcaccattga

SEQ ID NO: 1120 - DNA, 732 bp, Homo sapiens
atggcaggtgtgagtgcctgtataaaatattctatgtttaccttcaacttcttgttctggctatgtggtatcttgatcctagcattagcaatatgggtacgagtaagcaatgactctcaagcaatttttggttctgaagatgtaggctctagctcctacgttgctgtggacatattgattgctgtaggtgccatcatcatgattctgggcttcctgggatgctgcggtgctataaaagaaagtcgctgcatgcttctgttgtttttcataggcttgcttctgatcctgctcctgcaggtggcgacaggtatcctaggagctgttttcaaatctaagtctgatcgcattgtgaatgaaactctctatgaaaacacaaagcttttgagcgccacaggggaaagtgaaaaacaattccaggaagccataattgtgtttcaagaagagtttaaatgctgcggtttggtcaatggagctgctgattggggaaataattttcaacactatcctgaattatgtgcctgtctagataagcagagaccatgccaaagctataatggaaaacaagtttacaaagagacctgtatttctttcataaaagacttcttggcaaaaaatttgattatagttattggaatatcatttggactggcagttattgagatactgggtttggtgttttctatggtcctgtattgccagatcgggaacaaacaccatcaccatcaccattga

SEQ ID NO: 1121 - protein, 446 aa, Homo sapiens
MSCGNAKINSPAPSFEEVALMPNGSFKKISLSSYKGKWVVLFFYPLDFTFVCPTEVIAFSDSVSRFNELNCEVLACSIDSEYAHLQWTLQDRKKGGLGTMAIPMLADKTKSIARSYGVLEESQGVAYRGLFIIDPHGMLRQITVNDMPVGRSVEEVLRLLEAFQFVEKHGEVCPANWKKGAPTMKPEPNASVEGYFSKQSREFMAGVSACIKYSMFTFNFLFWLCGILILALAIWVRVSNDSQAIFGSEDVGSSSYVAVDILIAVGAIIMILGFLGCCGAIKESRCMLLLFFIGLLLILLLQVATGILGAVFKSKSDRIVNETLYENTKLLSATGESEKQFQEAIIVFQEEFKCCGLVNGAADWGNNFQHYPELCACLDKQRPCQSYNGKQVYKETCISFIKDFLAKNLIIVIGISFGLAVIEILGLVFSMVLYCQIGNKHHHHHH

SEQ ID NO: 1122 - protein, 243 aa, Homo sapiens
MAGVSACIKYSMFTFNFLFWLCGILILALAIWVRVSNDSQAIFGSEDVGSSSYVAVDILIAVGAIIMILGFLGCCGAIKESRCMLLLFFIGLLLILLLQVATGILGAVFKSKSDRIVNETLYENTKLLSATGESEKQFQEAIIVFQEEFKCCGLVNGAADWGNNFQHYPELCACLDKQRPCQSYNGKQVYKETCISFIKDFLAKNLIIVIGISFGLAVIEILGLVFSMVLYCQIGNKHHHHHH

SEQ ID NO: 1123 - DNA, 35 bp, Artificial Sequence
  PCR primer
ggagctagcgccgccatggcaggtgtgagtgcctg

SEQ ID NO: 1124 - DNA, 54 bp, Artificial Sequence
  PCR primer
gccggatcctcaatggtgatggtgatggtgtttgttcccgatctggcaatacag

SEQ ID NO: 1125 - DNA, 3919 bp, Homo sapiens
gggcagagcgtcagcaagagtacagagagaaactccaagggctgtgtgatctcctcacccagactgaaaaccgcctaattagtaaccaggaagcctttgtgattggagacggcacggtggagttacagaagtaccagtccaagcaagaggaattacagagagatatgcaaggaagtacacaggcaatggaagaaatagtgcgaaacacagaactctttttaaaagagagcggtgacgagttgtcccaagcggatagagctttgattgagcagaaactgaacgaggtgaagatgaagtgtgcgcagctgaacttaaaggctgagcagtcgagaaaggagttggataaggcagtgactacggccctcaaggaggagactgaaaaggttgcagctgtgaggcagctggaagagagcaaaaccaagatagaaaatcttttgaactggctgtcaaatgttgaggaagactccgaaggggtgtggacgaagcacacacaacccatggagcagaacggaacctatttgcatgaaggtgatagcaagttaggagctggcgaagaggatgaagtcaatggtaacctgctggagacagatgctgaagggcacagtgaggccacgaaggggaatctgaaccagcagtatgagaaagtcaaggcccagcacggaaagatcatggctcagcaccaggcggtcctcctagccacgcagtcggcccaggtgctgcttgagaaacagggccactatctgtcccccgaggagaaggagaagctgcagaagaacacgcaggagctgaaggtgcattacgagaaggtgctggccgagtgcgagaagaaggtgaagctgacgcactccctgcaggaggagctggagaagtttgacaccgactacagcgagtttgagcactggctacagcagtccgagcaagaactggcgaacctggaggcaggtgcggacgacctcagcgggctcatggacaagctgacgaggcagaagagcttctcagaggacgtcatttctcacaaaggcgacttgaggtacatcaccatttccggaaacagggtgatagacgctgccaagtcttgcagcaagagagacagtgacaggatcggcaaggacagcgtcgagacttccgcaacccacagagaagttcagaccaaactggaccaggttacagaccgcttcaggtctctctactctaagtgcagtgttcttggaaataacctcaaagacctggtggatcaataccagcagtatgaagatgcttcctgcggccttctctccgggctccaggcctgcgaggccaaagccagcaaacatttacgggagcccattgctttggaccccaaaaatctgcaaaggcagctggaagagaccaaggctttgcaaggacagatatcaagtcagcaggttgctgtagagaagctgaagaaaaccgcagaggtactcttggatgccaagggctcgctgcttcctgccaagaatgacatccagaagacgcttgatgacattgtcgggagatacgatgatctgtccaagtgtgtgaacgaacggaatgaaaagctccagatcactctgacccgctccctgagtgtgcaggacgctttggatgagatgctggactggatgggaagtgtggaaagctccctggtcaagccaggtcaagtgccactaaactccacagcgctccaggatctcatcagtaaagacaccatgctggagcaggatattacgggtcgtcaaagcagcataaatgccatgaacgaaaaggtgaagacatttatagagacgacagacccgtccacagcctcctccctgcaagcgaaaatgaaggatctgtctgctcgcttttccgaagcaagtcagaaacacaaggaaaagctagccaagatggtggagctaaaggccaaagtagagcagtttgagaagctctcagacaagctccagacgtttctagagacacagagccaggcgctcaccgaggtggccatgccaggaaaggatgttccggagctgtctcagcatatgcaggaatcaactgctaaattcttagaacacaggaaagatctcgaagctttgcacagcctcctgaaagagatatccagccatggcttaccaggggacaaagctctggtgtttgagaaaactaataacttgtcaaggaaattcaaagaaatggaggatactatccaagaaaagaaagacgctctaagttcttgtcaggagcagctgagtgcttttcaaaccctcgctcagtcactgaaaacatggataaaagagacaaccaagcaggttcccgttgtgaagccttctcttggcacagaggacttgagaaaatctctggaagaaaccaagaaattacaagaaaagtggaatctgaaagcaccagaaattcacaaagcaaacaacagtggtgtctcactatgtaacctgctgagtgcattgatcagccctgcaaaggccatagccgcagccaaatcaggtggagtaatactaaatggtgaaggaacagacacaaatactcaggtttcttggcaaataaaggtttaacatctattaagaaggacatgactgacataagccacagttacgaagacctgggcctcttactcaaggataaaatagttgaactgaacactaagctctccaaattgcaaaaggctcaggaagagtccagtgcaatgatgcagtggttagagaagatgaacaagacggccagcaggtggcccccgccacctacacctgcagacactgagtctgtgaagttgcaggtggagcagaacaagtcatttgaggcagaactgaagcaaaatgtaaacaaagtgcaagaattaaaagacaaactatcagagcttctggaagagaacccagaggctcccgaggcccagtcctggaagcaggcactggcagagatggacactaagtggcaagagctcaaccagttgaccatggacaggcaacaaaagctggaagagtcctccaataatctaacccagttccagaccacagaggcccagttaaaacagtggctcatggagaaggagctgatggtcagcgtgctcggccccttgtccattgacccaaacaaaacacaacagaaaataacaagtatgggtgaagacatagagaactcggagtgctgtgcagcatgattggtaagaatgtaaaatggtgcaacctttgtggaaagcagcagggcgcaaattgaaaaagacagaggcaaatcctcgtgccgaattcggcacgaggccagttatattatcccattcattagaaattaccagtgtaactaaacataaatattccagtttagagtgcttaaacgtagctatctttcttaaggccaggagggtaactttgtggtatctaaagggcttaaatttcagaatgcagaataaattgcctttttaaaaccaagcattttgtacaagcccttattttcagttttttaactaccaaataggtgtgatgtactttagaagtaaacaaagatgttcacccatgataatggatgttaaagctcctgcagttgttcttttcgtgtttaaagggtatattctaatagtggaagcatcaaacatgtcagtgatttcatctcattcagaaataaagagattaatattggtctttattttttggcattttaagttttatataaatggatgcagatggagattatcacccacaaatatatttaaatggatttttcttaatttgaatttcaagtaatctttttatttcaagtaattagttacgcatttagttacattgccagttttttttttatcaatttcagtaagacaaaatatactaaaatgtttaaatagcctcattcaatcttacattttgacatttcagcaatcattctggcttacagtaattagatcccctgttacgacacatgccctttgttcttaataactagc

SEQ ID NO: 1126 - protein, 194 aa, Homo sapiens
MTDISHSYEDLGLLLKDKIVELNTKLSKLQKAQEESSAMMQWLEKMNKTASRWPPPPTPADTESVKLQVEQNKSFEAELKQNVNKVQELKDKLSELLEENPEAPEAQSWKQALAEMDTKWQELNQLTMDRQQKLEESSNNLTQFQTTEAQLKQWLMEKELMVSVLGPLSIDPNKTQQKITSMGEDIENSECCAA

SEQ ID NO: 1127 - protein, 792 aa, Homo sapiens
MQGSTQAMEEIVRNTELFLKESGDELSQADRALIEQKLNEVKMKCAQLNLKAEQSRKELDKAVTTALKEETEKVAAVRQLEESKTKIENLLNWLSNVEEDSEGVWTKHTQPMEQNGTYLHEGDSKLGAGEEDEVNGNLLETDAEGHSEATKGNLNQQYEKVKAQHGKIMAQHQAVLLATQSAQVLLEKQGHYLSPEEKEKLQKNTQELKVHYEKVLAECEKKVKLTHSLQEELEKFDTDYSEFEHWLQQSEQELANLEAGADDLSGLMDKLTRQKSFSEDVISHKGDLRYITISGNRVIDAAKSCSKRDSDRIGKDSVETSATHREVQTKLDQVTDRFRSLYSKCSVLGNNLKDLVDQYQQYEDASCGLLSGLQACEAKASKHLREPIALDPKNLQRQLEETKALQGQISSQQVAVEKLKKTAEVLLDAKGSLLPAKNDIQKTLDDIVGRYDDLSKCVNERNEKLQITLTRSLSVQDALDEMLDWMGSVESSLVKPGQVPLNSTALQDLISKDTMLEQDITGRQSSINAMNEKVKTFIETTDPSTASSLQAKMKDLSARFSEASQKHKEKLAKMVELKAKVEQFEKLSDKLQTFLETQSQALTEVAMPGKDVPELSQHMQESTAKFLEHRKDLEALHSLLKEISSHGLPGDKALVFEKTNNLSRKFKEMEDTIQEKKDALSSCQEQLSAFQTLAQSLKTWIKETTKQVPVVKPSLGTEDLRKSLEETKKLQEKWNLKAPEIHKANNSGVSLCNLLSALISPAKAIAAAKSGGVILNGEGTDTNTQVSWQIKV

SEQ ID NO: 1128 - protein, 80 aa, Homo sapiens
MVQPLWKAAGRKLKKTEANPRAEFGTRPVILSHSLEITSVTKHKYSSLECLNVAIFLKARRVTLWYLKGLNFRMQNKLPF

SEQ ID NO: 1129 - protein, 86 aa, Homo sapiens
MYFRSKQRCSPMIMDVKAPAVVLFVFKGYILIVEASNMSVISSHSEIKRLILVFIFWHFKFYINGCRWRLSPTNIFKWIFLNLNFK

SEQ ID NO: 1130 - protein, 7 aa, Artificial Sequence
  EGF-type signature
CACVPGY
